(19) United States
(12) Patent Application Publication
(10) Pub. No.: US 2018/0215797 A1
(43) Pub. Date: Aug. 2, 2018

(54) Regulatory Protein Deficient Trichoderma Cells and Methods of Use Thereof

(71) Applicant: Glykos Finland OY, Helsinki (FI)

(72) Inventors: Christopher Landowski, Helsinki (FI); Ann Westerholm-Parvinen, Kirkkonummi (FI); Markku Saloheimo, Helsinki (FI)

(73) Assignee: Glykos Finland OY, Helsinki (FI)

(21) Appl. No.: 15/751,913

(22) PCT Filed: Aug. 11, 2016
(86) PCT No.: PCT/EP2016/069101

§ 371 Date: Feb. 12, 2018

(30) Foreign Application Priority Data
Aug. 13, 2015 (EP) 15180972.0

(51) Int. Cl. C07K 14/37; C12N 1/14; C12N 9/10; C12N 15/113

(52) U.S. Cl. CPC C07K 14/37; C12N 1/14; C12N 9/1051; C12N 2310/14; C12Y 204/01149; C12N 15/1137; C12Y 204/01258

(57) ABSTRACT

The present disclosure relates to compositions and methods useful for the production of heterologous proteins in filamentous fungal cells.

### FIELD OF THE INVENTION

[0001] The present disclosure relates to compositions and methods useful for the production of heterologous proteins in filamentous fungal cells, and more specifically in Trichoderma cells.

### BACKGROUND

[0002] Posttranslational modification of eukaryotic proteins, particularly therapeutic proteins such as immunoglobulins, is often necessary for proper protein folding and function. Because standard prokaryotic expression systems lack the proper machinery necessary for such modifications, alternative expression systems have to be used in production of these therapeutic proteins. Even where eukaryotic proteins do not have posttranslational modifications, prokaryotic expression systems often lack necessary chaperone proteins required for proper folding. Yeast and fungi are attractive options for expressing proteins as they can be easily grown at a large scale in simple media, which allows low production costs, and yeast and fungi have posttranslational machinery and chaperones that perform similar functions as found in mammalian cells. Moreover, tools are available to manipulate the relatively simple genetic makeup of yeast and fungal cells as well as more complex eukaryotic cells such as mammalian or insect cells (De Pourcq et al., Appl Microbiol Biotechnol, 87(5):1617-31). Despite these advantages, many therapeutic proteins are still being produced in mammalian cells, which produce therapeutic proteins with posttranslational modifications most resembling the native human proteins, whereas the posttranslational modifications naturally produced by yeast and fungi often differ from that found in mammalian cells.

[0003] To address this deficiency, new strains of yeast and fungi are being developed that produce posttranslational modifications that more closely resemble those found in native human proteins. Thus, there has been renewed interest in using yeast and fungal cells to express more complex proteins. However, due to the industry's focus on mammalian cell culture technology for such a long time, the fungal cell expression systems such as Trichoderma are not as well established as mammalian cell culture and therefore suffer from drawbacks when expressing mammalian proteins.

[0004] WO2013/102674 and WO2015/004241 discloses protease deficient filamentous fungal cells and their use for producing heterologous proteins. The reduction of certain protease activity has indeed been shown to be correlated to higher expression yield of heterologous polypeptide in those protease deficient filamentous fungal cells.

[0005] A need remains in the art for still further improved filamentous fungal cells, such as Trichoderma fungus cells, that can stably produce heterologous proteins, such as immunoglobulins, preferably at high levels of expression.

### SUMMARY

[0006] Described herein are Trichoderma cells having reduced or no activity in one or more regulatory proteins selected from the group consisting of ptf1 (SEQ ID NO:1), prp1 (SEQ ID NO:2), ptf9 (SEQ ID NO:3), ptf3 (SEQ ID NO:4), ptf8 (SEQ ID NO:5), ptf5 (SEQ ID NO:6), ptf6 (SEQ ID NO:7), ptf2 (SEQ ID NO:8), ptf4 (SEQ ID NO:9), ptf10 (SEQ ID NO:10), ptf7 (SEQ ID NO:11) and prp2 (SEQ ID NO:12). For example, said Trichoderma cell is Trichoderma reesei.

[0007] In a specific embodiment, said Trichoderma cell comprises a mutation in at least one gene encoding said regulatory protein selected from prp1, prp2, ptf1, ptf2, ptf3, ptf4, ptf5, ptf6, ptf7, ptf8, ptf9 and ptf10, said mutation rendering said regulatory protein non-functional.

[0008] In a specific embodiment that may be combined with the previous embodiments, said Trichoderma cell is selected from the group consisting of Δprp1, Δptf1, Δprp1 Δptf1, Δptf2, Δptf3, Δptf4, Δptf4 Δprp1 Δptf1, Δptf7, Δptf7 Δprp1 Δptf1, Δptf9, Δptf9 Δprp1 Δptf1, Δptf8 and Δptf8 Δprp1 Δptf1 deletion mutant Trichoderma cells.

[0009] In another specific embodiment that may be combined with any of the previous embodiments, the Trichoderma cell comprises a mutation in at least one gene encoding a protease, said mutation reducing or eliminating the corresponding protease activity, and said protease being selected from the group consisting of pep1, tsp1, slp1, gap1, gap2, pep4, pep3, and pep5.

[0010] In another specific embodiment that may be combined with any of the previous embodiments, the Trichoderma cell comprises a mutation in at least one gene encoding a protease, said mutation reducing or eliminating the corresponding protease activity, and said protease being selected from the group consisting of pep4, pep8, pep9, pep11, slp5, cpa5, cpa2, cpa3, amp3, tpp1, pep12, amp2, mp1, mp2, mp3, mp4, mp5, amp1, sep1, slp2, slp3, slp6, slp7 and slp8.

[0011] In another specific embodiment that may be combined with any of the previous embodiments, the Trichoderma cell may further have reduced or no activity of ALG3 protein, in particular a mutation in a gene encoding ALG3 protein that reduces or eliminates the corresponding activity.

[0012] In another specific embodiment that may be combined with any of the previous embodiments, the Trichoderma cell may further comprise a first polynucleotide encoding the N-acetylglucosaminyltransferase I catalytic domain and, optionally, a second polynucleotide encoding the N-acetylglucosaminyltransferase II catalytic domain.

[0013] In another specific embodiment that may be combined with any of the previous embodiments, the Trichoderma cell may further comprise a polynucleotide encoding an α-1,2-mannosidase, a mannosidase II, a galactosyl transferase and/or GDP-fucose synthesis activity.

[0014] In another specific embodiment that may be combined with any of the previous embodiments, the Trichoderma cell may further comprise a recombinant nucleic acid encoding a heterologous polypeptide. Typically, said heterologous polypeptide may be a mammalian polypeptide, for example, the mammalian polypeptide is glycosylated. In specific embodiments, the mammalian polypeptide is selected from the group consisting of an antibody and their antigen-binding fragments, a growth factor, an interferon, a cytokine, and an interleukin. In other specific embodiments, the mammalian polypeptide is selected from the group consisting of insulin-like growth factor 1 (IGF1), human growth hormone (hGH), and interferon alpha 2b (IFNα2b).

[0015] It is further disclosed a method of improving heterologous polypeptide production in a Trichoderma cell expression system, comprising
[0016] a. providing a Trichoderma cell as described above in which one or more regulatory proteins have reduced or eliminated activity, and
[0017] b. culturing said Trichoderma cell for production of a heterologous polypeptide. The heterologous polypeptide is advantageously produced at a higher yield when compared to the heterologous polypeptide produced in a corresponding parental Trichoderma cell in which said one or more regulatory proteins do not have reduced or eliminated activity.

[0018] The invention also relates to a method of making a heterologous polypeptide, comprising
[0019] a. providing a Trichoderma cell as defined above;
[0020] b. culturing said Trichoderma cell for production and secretion of a heterologous polypeptide in the culture medium; and,
[0021] c. recovering and, optionally, purifying the heterologous polypeptide from the culture medium.

[0022] In a specific embodiment of such method of making a heterologous polypeptide, the expression is reduced by contacting the cell with siRNA compounds directed against one or more of the genes encoding said regulatory proteins.

[0023] Thus, it is also disclosed a siRNA compound directed against a gene encoding a regulatory protein selected from the group consisting of ptf1 (SEQ ID NO:1), prp1 (SEQ ID NO:2), ptf9 (SEQ ID NO:3), ptf3 (SEQ ID NO:4), ptf8 (SEQ ID NO:5), ptf5 (SEQ ID NO:6), ptf6 (SEQ ID NO:7), ptf2 (SEQ ID NO:8), ptf4 (SEQ ID NO:9), ptf10 (SEQ ID NO:10), ptf7 (SEQ ID NO:11) and prp2 (SEQ ID NO:12).

[0024] In one specific embodiment, the siRNA compound may be further directed to a gene encoding a protease. In specific embodiments, said protease is selected from the group consisting of pep4, pep8, pep9, pep11, slp5, cpa5, cpa2, cpa3, amp3, tpp1, pep12, amp2, mp1, mp2, mp3, mp4, mp5, amp1, sep1, slp2, slp3, slp6, slp7, slp8.

### DESCRIPTION OF THE FIGURES

[0025] FIG. 1 depicts a map of a RNA hairpin vector containing protease regulator gene target sequences.

[0026] FIG. 2 depicts small RNA hairpin combination vector with protease and protease regulatory gene target sequences.

### DETAILED DESCRIPTION

[0027] The present invention relates to improved methods of producing recombinant heterologous polypeptides in filamentous fungal cells that have reduced or no activity in one or more of certain regulatory proteins. The present invention is based in part upon the surprising discovery that reducing the activity of certain regulatory proteins in filamentous fungal cells correlated with reduced protease activity and an increase in the expression and stability of a variety of recombinantly expressed heterologous proteins, such as immunoglobulins and growth factors.

[0028] In particular, the inventors have confirmed that either deleting the genes responsible for the particular regulatory proteins, or reducing the expression of said genes by siRNA compounds, achieved a significant reduction in certain protease activity, which correlates to a significant increase of heterologous polypeptide production in such Trichoderma cells containing such deletions, or cultured with such siRNA.

### Definitions

[0029] As used herein, an “immunoglobulin” refers to a multimeric protein containing a heavy chain and a light chain covalently coupled together and capable of specifically combining with antigen Immunoglobulin molecules are a large family of molecules that include several types of molecules such as IgM, IgD, IgG, IgA, and IgE.

[0030] As used herein, an “antibody” refers to intact immunoglobulin molecules, as well as fragments thereof which are capable of binding an antigen. These include hybrid (chimeric) antibody molecules (see, e.g., Winter et al. Nature 349:293-99225, 1991; and U.S. Pat. No. 4,816,567 226); F(ab′)2 and F(ab) fragments and Fv molecules; non-covalent heterodimers [227, 228]; single-chain Fv molecules (scFv) (see, e.g., Huston et al. Proc. Natl. Acad. Sci. U.S.A. 85:5897-83, 1988); dimeric and trimeric antibody fragment constructs; minibodies (see, e.g., Pack et al. Biochem 31, 1579-84, 1992; and Cumber et al. J. Immunology 149B, 120-26, 1992); humanized antibody molecules (see e.g., Riechmann et al. Nature 332, 323-27, 1988; Verhoeyan et al. Science 239, 1534-36, 1988; and GB 2,276,169); and any functional fragments obtained from such molecules, as well as antibodies obtained through non-conventional processes such as phage display. Preferably, the antibodies are monoclonal antibodies. Methods of obtaining monoclonal antibodies are well known in the art.

[0031] As used herein, a “peptide” and a “polypeptide” are amino acid sequences including a plurality of consecutive polymerized amino acid residues. For purpose of this invention, typically, peptides are those molecules including up to 50 amino acid residues, and polypeptides include more than 50 amino acid residues. The peptide or polypeptide may include modified amino acid residues, naturally occurring amino acid residues not encoded by a codon, and non-naturally occurring amino acid residues. As used herein, “protein” may refer to a peptide or a polypeptide of any size.

### Regulatory Proteins of the Disclosure

[0032] It is herein disclosed filamentous fungal cells, such as Trichoderma fungal cells, that can be used as expression system enabling high yield production of a heterologous polypeptide, such as a mammalian polypeptide, characterized in that they have reduced or no detectable activity in one or more regulatory proteins selected from ptf1 (SEQ ID NO:1), prp1 (SEQ ID NO:2), ptf9 (SEQ ID NO:3), ptf3 (SEQ ID NO:4), ptf8 (SEQ ID NO:5), ptf5 (SEQ ID NO:6), ptf6 (SEQ ID NO:7), ptf2 (SEQ ID NO:8), ptf4 (SEQ ID NO:9), ptf10 (SEQ ID NO:10), ptf7 (SEQ ID NO:11), and prp2 (SEQ ID NO:12).

[0033] A high expression of such regulatory proteins has been shown to correlate with a higher total protease activity, together with higher expression of certain proteases in Trichoderma cell. Thus, by reducing or eliminating the activity of such regulatory proteins in filamentous fungal cells, for example, in Trichoderma cells, that produce a heterologous polypeptide, the stability of the produced polypeptide is increased, resulting in an increased level of production of the polypeptide, and in some circumstances, improved quality of the produced polypeptide (e.g., full-length instead of degraded).

[0034] The regulatory proteins as found in wild type Trichoderma cells are described in more detail in the following Table 1:

| | | Protein | Gene |
|---|---|---|---|
| Gene # | Gene name | SEQ ID NO: | SEQ ID NO: |
| tre3449 | Ptf1 | 1 | 13 |
| tre122069 | Prp1 | 2 | 14 |
| tre108940 | Ptf9 | 3 | 15 |
| tre59740 | Ptf3 | 4 | 16 |
| tre106706 | Ptf8 | 5 | 17 |
| tre103158 | Ptf5 | 6 | 18 |
| tre103275 | Ptf6 | 7 | 19 |
| tre105269 | Ptf2 | 8 | 20 |
| tre76505 | Ptf4 | 9 | 21 |
| tre121130 | Ptf10 | 10 | 22 |
| tre106259 | Ptf7 | 11 | 23 |
| tre102947 | Prp2 | 12 | 24 |

### Methods of Reducing the Activity of the Regulatory Proteins of the Disclosure

[0035] Further aspects of the present disclosure relate to reducing or eliminating the activity of proteases found in filamentous fungal cells, for example Trichoderma cells, and more specifically a Trichoderma cell that produces a heterologous polypeptide, such as a mammalian polypeptide. In particular, the methods comprises reducing or eliminating the activity of one or more of the regulatory proteins of Trichoderma cells as described in Table 1 above or their corresponding homologous proteins in other related filamentous fungal species.

[0036] The activity of the regulatory proteins can be reduced in a filamentous fungal cell by any method known to those of the skilled person in the art.

[0037] In some embodiments reduced activity of a regulatory protein is achieved by reducing the expression of the corresponding gene, for example, by promoter modification of the corresponding gene or RNAi directed against the corresponding mRNA.

[0038] In other embodiments, reduced activity of the regulatory proteins is achieved by modifying the gene encoding the regulatory protein in such filamentous fungal cell, e.g. a Trichoderma cell, more specifically to disrupt or delete essential part of the gene and render the resulting mutant protein non-functional. Examples of such modifications include, without limitation, a knock-out mutation, a truncation mutation, a point mutation, a missense mutation, a substitution mutation, a frameshift mutation, an insertion mutation, that results in a reduction or elimination of the corresponding regulatory protein activity. Methods of generating at least one mutation in a regulatory protein encoding gene of interest are well known in the art and include, without limitation, random mutagenesis and screening, site-directed mutagenesis, PCR mutagenesis, insertional mutagenesis, chemical mutagenesis, and irradiation.

[0039] In certain embodiments, a portion of the regulatory protein encoding gene is modified, such as the region encoding the DNA binding domain or activating domain of a transcription factor, the coding region, or a control sequence required for expression of the coding region are deleted. Such a control sequence of the gene may be a promoter sequence or a functional part thereof, i.e., a part that is sufficient for affecting expression of the gene. For example, a promoter sequence may be inactivated resulting in no expression or a weaker promoter may be substituted for the native promoter sequence to reduce expression of the coding sequence. Other control sequences for possible modification include, without limitation, a leader sequence, a propeptide sequence, a signal sequence, a transcription terminator, and a transcriptional activator.

[0040] Regulatory protein encoding genes of the present disclosure may also be modified by utilizing gene deletion techniques to reduce or eliminate expression of said gene. Gene deletion techniques enable the partial or complete removal of the gene thereby eliminating their expression. In such methods, deletion of the gene may be accomplished by homologous recombination using a plasmid that has been constructed to contiguously contain the 5′ and 3′ regions flanking the gene.

[0041] The regulatory protein encoding genes of the present disclosure may also be modified by introducing, substituting, and/or removing one or more nucleotides in the gene, or a control sequence thereof required for the transcription or translation of the gene. For example, nucleotides may be inserted or removed for the introduction of a stop codon, the removal of the start codon, or a frame-shift of the open reading frame. Such a modification may be accomplished by methods known in the art, including without limitation, site-directed mutagenesis and PCR generated mutagenesis (see, for example, Botstein and Shortie, 1985, Science 229: 4719; Lo et al., 1985, Proceedings of the National Academy of Sciences USA 81: 2285; Higuchi et al., 1988, Nucleic Acids Research 16: 7351; Shimada, 1996, Meth. Mol. Bioi. 57: 157; Ho et al., 1989, Gene 77: 61; Horton et al., 1989, Gene 77: 61; and Sarkar and Sommer, 1990, BioTechniques 8: 404).

[0042] Additionally, regulatory protein encoding genes of the present disclosure may be modified by gene disruption techniques by inserting into the gene a disruptive nucleic acid construct containing a nucleic acid fragment homologous to the gene that will create a duplication of the region of homology and incorporate construct DNA between the duplicated regions. Such a gene disruption can eliminate gene expression if the inserted construct separates the promoter of the gene from the coding region or interrupts the coding sequence such that a nonfunctional gene product results. A disrupting construct may be simply a selectable marker gene accompanied by 5′ and 3′ regions homologous to the gene. The selectable marker enables identification of transformants containing the disrupted gene.

[0043] Regulatory protein encoding genes of the present disclosure may also be modified by the process of gene conversion (see, for example, Iglesias and Trautner, 1983, Molecular General Genetics 189:5 73-76). For example, in the gene conversion a nucleotide sequence corresponding to the gene is mutagenized in vitro to produce a defective nucleotide sequence, which is then transformed into a Trichoderma strain to produce a defective gene. By homologous recombination, the defective nucleotide sequence replaces the endogenous gene. It may be desirable that the defective nucleotide sequence also contains a marker for selection of transformants containing the defective gene.

[0044] Regulatory protein encoding genes of the present disclosure may also be modified by established anti-sense techniques using a nucleotide sequence complementary to the nucleotide sequence of the gene (see, for example, Parish and Stoker, 1997, FEMS Microbiology Letters 154: 151-157). In particular, expression of the gene by filamentous fungal cells may be reduced or inactivated by introducing a nucleotide sequence complementary to the nucleotide sequence of the gene, which may be transcribed in the strain and is capable of hybridizing to the mRNA produced in the cells. Under conditions allowing the complementary anti-sense nucleotide sequence to hybridize to the mRNA, the amount of protein translated is thus reduced or eliminated.

[0045] Regulatory protein encoding genes of the present disclosure may also be modified by random or specific mutagenesis using methods well known in the art, including without limitation, chemical mutagenesis (see, for example, Hopwood, The Isolation of Mutants in Methods in Microbiology (J. R. Norris and D. W. Ribbons, eds.) pp. 363-433, Academic Press, New York, 25 1970). Modification of the gene may be performed by subjecting filamentous fungal cells to mutagenesis and screening for mutant cells in which expression of the gene has been reduced or inactivated. The mutagenesis, which may be specific or random, may be performed, for example, by use of a suitable physical or chemical mutagenizing agent, use of a suitable oligonucleotide, subjecting the DNA sequence to peR generated mutagenesis, or any combination thereof. Examples of physical and chemical mutagenizing agents include, without limitation, ultraviolet (UV) irradiation, hydroxylamine, N-methyl-N′-nitro-N-nitrosoguanidine (MNNG), N-methyl-N′-nitrosogaunidine (NTG) O-methyl hydroxylamine, nitrous acid, ethyl methane sulphonate (EMS), sodium bisulphite, formic acid, and nucleotide analogues. When such agents are used, the mutagenesis is typically performed by incubating the Trichoderma cells to be mutagenized in the presence of the mutagenizing agent of choice under suitable conditions, and then selecting for mutants exhibiting reduced or no expression of the gene.

[0046] Regulatory protein encoding genes of the present disclosure may also be modified by CRISPR-CAS system, or clustered regularly interspaced short palindromic repeats. CRISPR-Cas system is a novel technique of gene editing (silencing, enhancing or changing specific genes). By inserting a plasmid containing cas9 genes and specifically designed CRISPRs, the organism's genome can be cut at any desired location. Cas9 gene originates from the type II bacterial CRISPR system of Streptococcus pyogenes. Gene product, CAS9 nuclease, complexes with a specific genome targeting CRISPR guideRNA and has high site specificity of the DNA cutting activity. It has been shown recently that CAS9 can function as an RNA guided endonuclease in various heterologous organisms (Mali et al. 2013: RNA guided human genome engineering via Cas9. Science 339:823-826; Cong et al 2013: Multiplex genome engineering using CRISPR-Cas systems. Science 339:819-823; Jiang et al 2013: RNA-guided editing of bacterial genomes using CRISPR-Cas systems. Nat Biotechnol 31:233-239; Jinek et al. 2013: RNA programmed genome editing in human cells. eLife 2:e00471; Hwang et al. 2013: Efficient genome editing in zebrafish using a CRISPR-Cas system. Nat Biotech 31:227-279. DiCarlo et al 2013: Genome engineering in Saccharomyces cerevisiae using CRISPR-Cas systems. NAR 41:4336-4343). Also filamentous fungi are have been modified with CRISPR-Cas system (Arazoef et al. (2015) Tailor-made CRISPR/Cas system for highly efficient targeted gene replacement in the rice blast fungus. Biotechnol Bioeng. doi: 10.1002/bit.25662). GuideRNA synthesis have been usually carried out from promoters transcribed by RNA polymerase III, most commonly used being SNR52 snoRNA promoter in yeasts and U3/U6 snoRNA promoters in plants and animals. Promoters transcribed by RNA polymerase II have been considered to be unsuitable for guideRNA synthesis because of the posttranscriptional modifications, 5′capping, 5′/3′ UTR's and poly A tailing. However, it has been recently demonstrated that RNA polymerase II type promoters can be used if the guideRNA sequence is flanked with self-processing ribozyme sequences. Primary transcript then undergoes self-catalyzed cleavage and generates desired gRNA sequence (Gao and Zhao 2014: Self processing of ribozyme-flanked RNAs into guide RNA's in vitro and in vivo for CRISPR-mediated genome editing. Journal of Integrative Plant Biology epublication ahead of print; March 2014).

[0047] In another specific embodiment, the activity of a regulatory protein of the present disclosure may also be reduced by established RNA interference (RNAi) techniques (see, for example, WO 2005/056772 and WO 2008/080017) and for example by culturing the filamentous fungal cell, e.g. a Trichoderma cell, under the presence of an efficient concentration of a short interference RNA (siRNA) compound directed against said regulatory protein encoding gene, as described below, and thereby reducing the activity of said regulatory protein in said filamentous fungal cell.

[0048] In certain embodiments, the at least one mutation or modification in a regulatory protein encoding gene of the present disclosure results in a modified total protease activity. In other embodiments, the at least one modification in a regulatory protein encoding gene of the present disclosure results in a decreased protease activity in one or more of the following protease activity: pep4, pep8, pep9, pep11, slp5, cpa2, cpa3, and amp3.

[0049] In certain embodiments, for example, in a Trichoderma cell, the at least one mutation or modification in a regulatory protein encoding gene of the present disclosure results in a reduction of total protease activity to 90%, 80%, 70%, 60%, 50% or less, as compared to the total protease activity in the corresponding parental Trichoderma cell with no mutation or modification in said regulatory protein encoding gene.

### Filamentous Fungal Cells of the Disclosure

[0050] It is further disclosed herein filamentous fungal cells, such as Trichoderma cells, having reduced or no activity in one or more regulatory proteins as described in Table 1, and their use for producing heterologous polypeptides, such as mammalian polypeptides.

[0051] “Filamentous fungal cells” include cells from all filamentous forms of the subdivision Eumycota and Oomycota (as defined by Hawksworth et al., In, Ainsworth and Bisby's Dictionary of The Fungi, 8th edition, 1995, CAB International, University Press, Cambridge, UK). Filamentous fungal cells are generally characterized by a mycelial wall composed of chitin, cellulose, glucan, chitosan, mannan, and other complex polysaccharides. Vegetative growth is by hyphal elongation and carbon catabolism is obligately aerobic. In contrast, vegetative growth by yeasts such as Saccharomyces cerevisiae is by budding of a unicellular thallus and carbon catabolism may be fermentative.

[0052] Any filamentous fungal cell may be used in the present disclosure so long as it remains viable after being transformed with a sequence of nucleic acids and/or being modified or mutated to decrease protease activity. Preferably, the filamentous fungal cell is not adversely affected by the transduction of the necessary nucleic acid sequences, the subsequent expression of the proteins (e.g., mammalian proteins), or the resulting intermediates.

[0053] Examples of suitable filamentous fungal cells include, without limitation, cells from an Acremonium, Aspergillus, Fusarium, Humicola, Mucor, Myceliophthora, Neurospora, Penicillium, Scytalidium, Thielavia, Tolypocladium, or Trichoderma strain. In certain embodiments, the filamentous fungal cell is from a Trichoderma sp., Acremonium, Aspergillus, Aureobasidium, Cryptococcus, Chrysosporium, Chrysosporium lucknowense, Filibasidium, Fusarium, Gibberella, Magnaporthe, Mucor, Myceliophthora, Myrothecium, Neocallimastix, Neurospora, Paecilomyces, Penicillium, Piromyces, Schizophyllum, Talaromyces, Thermoascus, Thielavia, or Tolypocladium strain.

[0054] Aspergillus fungal cells of the present disclosure may include, without limitation, Aspergillus aculeatus, Aspergillus awamori, Aspergillus clavatus, Aspergillus flavus, Aspergillus foetidus, Aspergillus fumigatus, Aspergillus japonicus, Aspergillus nidulans, Aspergillus niger, Aspergillus oryzae, or Aspergillus terreus.

[0055] Neurospora fungal cells of the present disclosure may include, without limitation, Neurospora crassa.

[0056] In certain embodiments, the filamentous fungal cell is selected from the group consisting of Trichoderma (T. reesei), Neurospora (N. crassa), Penicillium (P. chrysogenum), Aspergillus (A. nidulans, A. niger and A. oryzae), Myceliophthora (M. thermophila) and Chrysosporium (C. lucknowense).

[0057] In certain embodiments, the filamentous fungal cell is a Trichoderma fungal cell. Trichoderma fungal cells of the present disclosure may be derived from a wild-type Trichoderma strain or a mutant thereof. Examples of suitable Trichoderma fungal cells include, without limitation, Trichoderma harzianum, Trichoderma koningii, Trichoderma longibrachiatum, Trichoderma reesei, Trichoderma atroviride, Trichoderma vixens, Trichoderma viride; and alternative sexual form thereof (i.e., Hypocrea). In a specific embodiment, the filamentous fungal cell for use according to the disclosure is Trichoderma reesei.

[0058] General methods to disrupt genes of and cultivate filamentous fungal cells are disclosed, for example, for Penicillium, in Kopke et al. (2010) Application of the Saccharomyces cerevisiae FLP/FRT recombination system in filamentous fungi for marker recycling and construction of knockout strains devoid of heterologous genes. Appl Environ Microbiol. 76(14):4664-74. doi: 10.1128/AEM.00670-10, for Aspergillus, in Maruyama and Kitamoto (2011), Targeted Gene Disruption in Koji Mold Aspergillus oryzae, in James A. Williams (ed.), Strain Engineering: Methods and Protocols, Methods in Molecular Biology, vol. 765, DOI 10.1007/978-1-61779-197-0_27; for Neurospora, in Collopy et al. (2010) High-throughput construction of gene deletion cassettes for generation of Neurospora crassa knockout strains. Methods Mol Biol. 2010; 638:33-40. doi: 10.1007/978-1-60761-611-5_3; and for Myceliophthora or Chrysosporium PCT/NL2010/000045 and PCT/EP98/06496.

[0059] A method to transform filamentous fungal cells include Agrobacterium mediated transformation. Gene transformation method based on Agrobacterium tumefaciens T-DNA transfer to host cell has been originally developed with plants. It has been applied to yeasts (Bundock et al. (1995) EMBO J 14:3206-3214) and filamentous fungi (de Groot et al. (1998) Nat Biotechnol 16:839-842). If the T-DNA includes homologous regions with fungal genome, the integration to host cell can occur through homologous recombination, thus, enabling targeted knockouts and gene replacements (Gouka et al. (1999) Nat Biotechnol 17:598-601) (Zeilinger (2004) Curr Genet 45:54-60) (Zwiers and De Waard (2001) Curr Genet 39:388-393) (Zhang et al. (2003) Mol Gen Genomics 268:645-655). In general, the expression cassette with gene of interest and promoter/terminator sequences functional in fungal host can be flanked with sequences homologus to the regions flanking the sequence to be knocked out from fungal genome. Cassette with homologous flanks is then inserted to Agrobacterium tumefaciens binary vector between the T-DNA borders, left border and right border. Binary vector can be electroporated to Agrobacterium tumefaciens strain like C58C1 pGV2260 or LBA pAL4404 containing the helper plasmid encoding vir proteins needed for T-DNA transfer. Co-cultivation of Trichoderma reesei and Agrobacterium can be made by mixing the fungal spores or pre-germinated spores or protoplasts with Agrobacterium suspension culture and plating the mixture to sterile cellophane disks placed on top of the transformation plates. On the absence of wounded plant tissue, vir-gene induction can be launched by the presence of inducing agents in the culture media, like asetosyringone. After of two days of co-cultivation, sellophane disks can be transferred on top of selection plates, containing the selective agent for transformed Trichoderma cells and an antibiotic agent inhibiting the Agrobacterium growth with no adverse effects on Trichoderma, like ticarcillin. Once the transformed fungal colonies appear, they can be picked and purified through single spore cultures, as routinely done with other transformation methods.

[0060] Certain aspects of the present disclosure relate to filamentous fungal cells, for example a Trichoderma cell having reduced or no detectable activity in one or more regulatory proteins selected from ptf1 (SEQ ID NO:1), prp1 (SEQ ID NO:2), ptf9 (SEQ ID NO:3), ptf3 (SEQ ID NO:4), ptf8 (SEQ ID NO:5), ptf5 (SEQ ID NO:6), ptf6 (SEQ ID NO:7), ptf2 (SEQ ID NO:8), ptf4 (SEQ ID NO:9), ptf10 (SEQ ID NO:10), prp2 (SEQ ID NO:12), and ptf7 (SEQ ID NO:11).

[0061] Certain aspects of the present disclosure relate to filamentous fungal cells, for example, Aspergillus cells, having reduced or no detectable activity in one or more regulatory proteins selected from EHA27990.1 (SEQ ID NO:187), XP_001389638.1 (SEQ ID NO:188), XP_001401764.1 (SEQ ID NO:204), EHA21595.1 (SEQ ID NO:189), XP_001398220.2 (SEQ ID NO:190) and XP_001388587.2 (SEQ ID NO:191).

[0062] Certain aspects of the present disclosure relate to filamentous fungal cells, for example, Neurospora cells, having reduced or no detectable activity in one or more regulatory proteins selected from XP_958054.1 (SEQ ID NO:192), XP_964115.2 (SEQ ID NO:193), XP_965444.2 (SEQ ID NO:194), XP_961139.2 (SEQ ID NO:195), CAC28684.1 (SEQ ID NO:196), and XP_011392968.1 (SEQ ID NO:197).

[0063] Certain aspects of the present disclosure relate to filamentous fungal cells, for example, Myceliophthora cells, having reduced or no detectable activity in one or more regulatory proteins selected from XP_003661571.1 (SEQ ID NO:198), XP_003659580.1 (SEQ ID NO:199), and XP_003658871.1 (SEQ ID NO:200).

[0064] Certain aspects of the present disclosure relate to filamentous fungal cells, for example, Fusarium cells, having reduced or no detectable activity in EWG43214.1 (SEQ ID NO:201).

[0065] Certain aspects of the present disclosure relate to filamentous fungal cells, for example, Penicillium cells, having reduced or no detectable activity in one or more regulatory proteins selected from CDM30613.1 (SEQ ID NO:202) and XP_002567858.1 (SEQ ID NO:203).

[0066] Other aspects of the present disclosure relate to a Trichoderma fungal cell, which comprises a mutation, for example a gene deletion, in at least one gene encoding said regulatory protein selected from prp1, prp2, ptf1, ptf2, ptf3, ptf4, ptf5, ptf6, ptf7, ptf8, ptf9 and ptf10, said mutation rendering said regulatory protein non-functional.

[0067] In a specific embodiment, the Trichoderma cell is selected from the group consisting of Δprp1, Δptf1, Δprp1 Δptf1, Δptf2, Δptf3, Δptf4, Δptf4 Δprp1 Δptf1, Δptf7, Δptf7 Δprp1 Δptf1, Δptf9, Δptf9 Δprp1 Δptf1, Δptf8 and Δptf8 Δprp1 Δptf1 deletion mutant Trichoderma cells.

Combinations of Mutations in Regulatory Protein Encoding Genes and/or Protease Encoding Genes

[0068] The filamentous fungal cells or Trichoderma fungal cells of the present disclosure may contain reduced activity in a combination of those regulatory proteins selected from the group consisting of ptf1 (SEQ ID NO:1), prp1 (SEQ ID NO:2), ptf9 (SEQ ID NO:3), ptf3 (SEQ ID NO:4), ptf8 (SEQ ID NO:5), ptf5 (SEQ ID NO:6), ptf6 (SEQ ID NO:7), ptf2 (SEQ ID NO:8), ptf4 (SEQ ID NO:9), ptf10 (SEQ ID NO:10), prp2 (SEQ ID NO:12), and ptf7 (SEQ ID NO:11).

[0069] In some embodiments, the filamentous fungal cell, for example, a Trichoderma cell has reduced or no expression levels of at least the regulatory protein encoding genes prp1 and ptf1 genes. In certain embodiments, the filamentous fungal cell, for example a Trichoderma cell, has reduced or no expression levels of at least the regulatory protein encoding genes ptf4, prp1 and ptf1 genes. In other embodiments, the filamentous fungal cell, or Trichoderma cell, has reduced or no expression levels of at least the regulatory protein encoding genes ptf7, prp1, and ptf1. In other embodiments, the filamentous fungal cell, or Trichoderma cell, has reduced or no expression levels of at least the regulatory protein encoding genes ptf8, prp1, and ptf1. In other embodiments, the filamentous fungal cell, or Trichoderma cell, has reduced or no expression levels of at least the regulatory protein encoding genes ptf9, prp1, and ptf1.

[0070] For example, the filamentous fungal, typically a Trichoderma cell, is selected from the group consisting of Δprp1 Δptf1, Δptf4 Δprp1 Δptf1, Δptf7 Δprp1 Δptf1, Δptf8 Δprp1 Δptf1, Δptf9 Δprp1 Δptf1, deletion mutant Trichoderma cells.

[0071] Reduction or elimination of the regulatory proteins of the disclosure in a filamentous fungal cell, for example a Trichoderma cell, results in a decreased protease activity in one or more of the following protease activity: pep4, pep8, pep9, pep11, slp5, cpa2, cpa3, and amp3.

[0072] Advantageously, the filamentous fungal cells or Trichoderma fungal cells of the present disclosure may also have reduced activity of one or more proteases. In certain embodiments, the expression level of the one or more proteases is reduced.

[0073] Accordingly, it is hereby disclosed filamentous fungal cells or Trichoderma cells with reduced or no activity in certain regulatory proteins as described above, further comprising a mutation in at least one gene encoding a protease, said mutation reducing or eliminating the corresponding protease activity (as compared to corresponding parent strain which does not have said mutation), and said protease being selected from the group consisting of pep1, tsp1, slp1, gap1, gap2, pep4, pep3, and pep5.

[0074] It is also disclosed filamentous fungal cells or Trichoderma cells with reduced or no activity in certain regulatory proteins as described above, further comprising a mutation in at least one gene encoding a protease, said mutation reducing or eliminating the corresponding protease activity (as compared to corresponding parent strain which does not have said mutation), and said protease being selected from the group consisting of the following protease pep8, pep9, pep11, slp5, cpa5, cpa2, cpa3, amp3, tpp1, pep12, amp2, mep1, mep2, mep3, mep4, mep5, amp1, sep1, slp2, slp3, slp6, slp7, slp8.

[0075] The filamentous fungal cells or Trichoderma cells of the disclosure may further have one or more additional mutations in at least one gene encoding a protease, said mutation reducing or eliminating the corresponding protease activity (as compared to corresponding parent strain which does not have said mutation), and said protease being selected from the group consisting of
[0076] an aspartic protease pep6, pep10, pep13, pep14, or pep16;
[0077] slp like protease slp57433, slp35726, slp60791, or slp109276;
[0078] gap like protease gap3 or gap4;
[0079] sedolisin like protease sed2, sed3, or sed5;
[0080] Group A protease selected from the group of protease65735, protease77577, protease81087, protease56920, protease122083, protease79485, protease120998, or protease61127;
[0081] Group B protease selected from the group of protease21659, protease58387, protease75159, protease56853, or protease64193;
[0082] Group C protease selected from the group of protease82452, protease80762, protease21668, protease81115, protease82141, protease23475;
[0083] Group D protease selected from the group of protease121890, protease22718, protease47127, protease61912, protease80843, protease66608, protease72612, protease40199; or
[0084] Group E protease selected from the group of protease22210, protease111694, protease82577.
[0085] (the corresponding amino acid sequences of these proteases are disclosed in WO2015/004241 or available according to their ID numbers at the following link http://genome.jgi-psforg/Trire2/Trire2.home.html)

[0086] Methods for reducing or eliminating protease activity in filamentous fungal cell, and the corresponding proteases are disclosed in WO2013/102674 and WO2015/004241, which contents are incorporated herein by reference. In preferred embodiments, the mutation eliminate the corresponding protease activity, in other words, the mutation renders the corresponding protease inactive. Said mutation eliminating the corresponding protease activity may typically be a deletion mutation.

[0087] Examples of suitable proteases found in Trichoderma reesei cells are disclosed in the following table 2:

TABLE 2
Proteases of Trichoderma reesei (ID number according to Joint
Genome Institute Database, see http://genome.jgi-psf.org/Trire2/
Trire2.home.html)

| Name of the | | Amino acid | Nucleotide |
|---|---|---|---|
| Protease | Gene# | SEQ ID NO: | SEQ ID NO: |
| Pep1 | tre74156 | 41 | 42 |
| Tsp1 | tre73897 | 79 | 80 |
| Slp1 | tre51365 | 63 | 64 |
| Gap1 | tre69555 | 81 | 82 |
| Gap2 | tre106661 | 83 | 84 |
| Pep4 | tre77579 | 51 | 52 |
| Pep3 | tre121133 | 85 | 86 |
| Pep8 | tre122076 | 55 | 56 |
| Pep9 | tre79807 | 57 | 58 |
| Pep11 | tre121306 | 45 | 46 |
| Slp5 | tre64719 | 67 | 68 |
| Cpa5 | tre120998 | 87 | 88 |
| Cpa3 | tre22459 | 37 | 38 |
| Amp3 | tre23475 | 29 | 30 |
| Tpp1 | tre82623 | 59 | 60 |
| Pep12 | tre119876 | 89 | 90 |
| Amp2 | tre108592 | 91 | 92 |
| Mep1 | tre122703 | 93 | 94 |
| Mep2 | tre122576 | 95 | 96 |
| Mep3 | tre4308 | 97 | 98 |
| Mep4 | tre53343 | 99 | 100 |
| Mep5 | tre73809 | 101 | 102 |
| Amp1 | tre81070 | 27 | 28 |
| Sep1 | tre124051 | 61 | 62 |
| Slp2 | tre123244 | 103 | 104 |
| Slp3 | tre123234 | 65 | 66 |
| Slp6 | tre121495 | 69 | 70 |
| Slp7 | tre123865 | 105 | 106 |
| Slp8 | tre58698 | 71 | 72 |

[0088] Accordingly, it is also disclosed a filamentous fungal cell, for example a Trichoderma cell with reduced or no activity in one or more regulatory proteins of Table 1 as described above, and further comprising a gene deletion of at least 5, 6, 7, 8 or 9 protease encoding genes.

### Heterologous Polypeptides

[0089] By reducing or eliminating (for example by gene deletion) the activity of the regulatory proteins as described in Table 1 above, the production of heterologous polypeptides in such filamentous fungal cells may be increased. Accordingly, in one specific embodiment, the filamentous fungal cell or Trichoderma cell as disclosed herein further comprises a recombinant polynucleotide encoding a heterologous polypeptide. Advantageously, said heterologous polypeptide is produced at increased levels, for example at least two-fold increased levels, as compared to the level produced in a parental cell which does not have reduced activity in said regulatory proteins, for example a parental cell which does not have a gene deletion in said regulatory protein encoding gene.

[0090] As used herein a “heterologous polypeptide” refers to a polypeptide that is not naturally found in (i.e., endogenous) a filamentous fungal cell of the present disclosure, or that is expressed at an elevated level in a filamentous fungal cell as compared to the endogenous version of the polypeptide. In certain embodiments, the heterologous polypeptide is a mammalian polypeptide. In other embodiments, the heterologous polypeptide is a non-mammalian polypeptide.

[0091] Mammalian polypeptides of the present disclosure may be any mammalian polypeptide having a biological activity of interest. As used herein, a “mammalian polypeptide” is a polypeptide that is natively expressed in a mammal, a polypeptide that is derived from a polypeptide that is natively expressed in a mammal, or a fragment thereof. A mammalian polypeptide also includes peptides and oligopeptides that retain biological activity. Mammalian polypeptides of the present disclosure may also include two or more polypeptides that are combined to form the encoded product. Mammalian polypeptides of the present disclosure may further include fusion polypeptides, which contain a combination of partial or complete amino acid sequences obtained from at least two different polypeptides. Mammalian polypeptides may also include naturally occurring allelic and engineered variations of any of the disclosed mammalian polypeptides and hybrid mammalian polypeptides.

[0092] The mammalian polypeptide may be a naturally glycosylated polypeptide or a naturally non-glycosylated polypeptide.

[0093] Examples of suitable mammalian polypeptides include, without limitation, immunoglobulins, antibodies, antigens, antimicrobial peptides, enzymes, growth factors, hormones, interferons, cytokines, interleukins, immunodilators, neurotransmitters, receptors, reporter proteins, structural proteins, and transcription factors.

[0094] Specific examples of suitable mammalian polypeptides include, without limitation, immunoglobulins, immunoglobulin heavy chains, immunoglobulin light chains, monoclonal antibodies, hybrid antibodies, F(ab′)2 antibody fragments, F(ab) antibody fragments, Fv molecules, single-chain Fv antibodies, dimeric antibody fragments, trimeric antibody fragments, functional antibody fragments, immunoadhesins, insulin-like growth factor 1, growth hormone, insulin, interferon alpha 2b, fibroblast growth factor 21, human serum albumin, camelid antibodies and/or antibody fragments, single domain antibodies, multimeric single domain antibodies, and erythropoietin.

[0095] Other examples of suitable mammalian proteins include, without limitation, an oxidoreductase, a transferase, a hydrolase, a lyase, an isomerase, a ligase, an aminopeptidase, an amylase, a carbohydrase, a carboxypeptidase, a catalase, a glycosyltransferase, a deoxyribonuclease, an esterase, a galactosidase, a betagalactosidase, a glucosidase, a glucuronidase, a glucuronoyl esterase, a haloperoxidase, an invertase, a lipase, an oxidase, a phospholipase, a proteolytic enzyme, a ribonuclease, a urokinase, an albumin, a collagen, a tropoelastin, and an elastin.

[0096] Non-mammalian polypeptides of the present disclosure may be any non-mammalian polypeptide having a biological activity of interest. As used herein, a “non-mammalian polypeptide” is a polypeptide that is natively expressed in a non-mammalian organism, such as a fungal cell, a polypeptide that is derived from a polypeptide that is natively expressed in a non-mammal organism, or a fragment thereof. A non-mammalian polypeptide also includes peptides and oligopeptides that retain biological activity. Non-mammalian polypeptides of the present disclosure may also include two or more polypeptides that are combined to form the encoded product. Non-mammalian polypeptides of the present disclosure may further include fusion polypeptides, which contain a combination of partial or complete amino acid sequences obtained from at least two different polypeptides. Non-mammalian polypeptides may also include naturally occurring allelic and engineered variations of any of the disclosed non-mammalian polypeptides and hybrid non-mammalian polypeptides.

[0097] Examples of suitable non-mammalian polypeptides include, without limitation, aminopeptidases, amylases, carbohydrases, carboxypeptidases, catalases, cellulases, chitinases, cutinases, deoxyribonucleases, esterases, alpha-galactosidases, beta-galactosidases, glucoamylases, alpha-glucosidases, beta-glucosidases, invertases, laccases, lipases, mutanases, oxidases, pectinolytic enzymes, peroxidases, phospholipases, phytases, polyphenoloxidases, proteolytic enzymes, ribonucleases, transglutaminases and xylanases.

### Recombinant Nucleic Acid Encoding Heterologous Polypeptides

[0098] Nucleic acids encoding the heterologous polypeptides of the present disclosure are prepared by any suitable method known in the art, including, without limitation, direct chemical synthesis or cloning. For direct chemical synthesis, formation of a polymer of nucleic acids typically involves sequential addition of 3′-blocked and 5′-blocked nucleotide monomers to the terminal 5′-hydroxyl group of a growing nucleotide chain, wherein each addition is effected by nucleophilic attack of the terminal 5′-hydroxyl group of the growing chain on the 3′-position of the added monomer, which is typically a phosphorus derivative, such as a phosphotriester, phosphoramidite, or the like. Such methodology is known to those of ordinary skill in the art and is described in the pertinent texts and literature [e.g., in Matteucci et al., (1980) Tetrahedron Lett 21:719-722; U.S. Pat. Nos. 4,500,707; 5,436,327; and 5,700,637]. In addition, the desired nucleic acids may be isolated from natural sources by splitting DNA using appropriate restriction enzymes, separating the fragments using gel electrophoresis, and thereafter, recovering the desired nucleic acid sequence from the gel via techniques known to those of ordinary skill in the art, such as utilization of polymerase chain reactions (PCR; e.g., U.S. Pat. No. 4,683,195).

[0099] Each nucleic acid encoding the heterologous polypeptides of the present disclosure can be incorporated into an expression vector. “Expression vector” or “vector” refers to a compound and/or composition that transduces, transforms, or infects a host cell, thereby causing the cell to express nucleic acids and/or proteins other than those native to the cell, or in a manner not native to the cell. An “expression vector” contains a sequence of nucleic acids (ordinarily RNA or DNA) to be expressed by the host cell. Optionally, the expression vector also includes materials to aid in achieving entry of the nucleic acid into the host cell, such as a virus, liposome, protein coating, or the like. The expression vectors contemplated for use in the present disclosure include those into which a nucleic acid sequence can be inserted, along with any preferred or required operational elements. Further, the expression vector must be one that can be transferred into a host cell and replicated therein. Preferred expression vectors are plasmids, particularly those with restriction sites that have been well documented and that contain the operational elements preferred or required for transcription of the nucleic acid sequence. Such plasmids, as well as other expression vectors, are well known in the art.

[0100] Incorporation of the individual nucleic acids may be accomplished through known methods that include, for example, the use of restriction enzymes (such as BamHI, EcoRI, HhaI, XhoI, XmaI, and so forth) to cleave specific sites in the expression vector, e.g., plasmid. The restriction enzyme produces single stranded ends that may be annealed to a polynucleotide having, or synthesized to have, a terminus with a sequence complementary to the ends of the cleaved expression vector. Annealing is performed using an appropriate enzyme, e.g., DNA ligase. As will be appreciated by those of ordinary skill in the art, both the expression vector and the desired polynucleotide are often cleaved with the same restriction enzyme, thereby assuring that the ends of the expression vector and the ends of the polynucleotide are complementary to each other. In addition, DNA linkers maybe used to facilitate linking of nucleic acids sequences into an expression vector.

[0101] A series of individual nucleic acids can also be combined by utilizing methods that are known in the art (e.g., U.S. Pat. No. 4,683,195).

[0102] For example, each of the desired nucleic acids can be initially generated in a separate PCR. Thereafter, specific primers are designed such that the ends of the PCR products contain complementary sequences. When the PCR products are mixed, denatured, and reannealed, the strands having the matching sequences at their 3′ ends overlap and can act as primers for each other. Extension of this overlap by DNA polymerase produces a molecule in which the original sequences are “spliced” together. In this way, a series of individual polynucleotides may be “spliced” together and subsequently transduced into a host cell simultaneously. Thus, expression of each of the plurality of polynucleotides is affected.

[0103] Individual polynucleotides, or “spliced” polynucleotides, are then incorporated into an expression vector. The present disclosure is not limited with respect to the process by which the polynucleotide is incorporated into the expression vector. Those of ordinary skill in the art are familiar with the necessary steps for incorporating a nucleic acid into an expression vector. A typical expression vector contains the desired nucleic acid preceded by one or more regulatory regions, along with a ribosome binding site, e.g., a nucleotide sequence that is 3-9 nucleotides in length and located 3-11 nucleotides upstream of the initiation codon in E. coli. See Shine and Dalgarno (1975) Nature 254(5495):34-38 and Steitz (1979) Biological Regulation and Development (ed. Goldberger, R. F.), 1:349-399 (Plenum, New York).

[0104] The term “operably linked” as used herein refers to a configuration in which a control sequence is placed at an appropriate position relative to the coding sequence of the nucleic acid or polynucleotide such that the control sequence directs the expression of a polypeptide.

[0105] Regulatory regions include, for example, those regions that contain a promoter and an operator. A promoter is operably linked to the desired polynucleotide, thereby initiating transcription of the polynucleotide via an RNA polymerase enzyme. An operator is a sequence of nucleic acids adjacent to the promoter, which contains a protein-binding domain where a repressor protein can bind. In the absence of a repressor protein, transcription initiates through the promoter. When present, the repressor protein specific to the protein-binding domain of the operator binds to the operator, thereby inhibiting transcription. In this way, control of transcription is accomplished, based upon the particular regulatory regions used and the presence or absence of the corresponding repressor protein. Examples include lactose promoters (Lad repressor protein changes conformation when contacted with lactose, thereby preventing the Lad repressor protein from binding to the operator) and tryptophan promoters (when complexed with tryptophan, TrpR repressor protein has a conformation that binds the operator; in the absence of tryptophan, the TrpR repressor protein has a conformation that does not bind to the operator). Another example is the tac promoter (see de Boer et al., (1983) Proc Natl Acad Sci USA 80(1):21-25). As will be appreciated by those of ordinary skill in the art, these and other expression vectors may be used in the present disclosure, and the present disclosure is not limited in this respect.

[0106] Although any suitable expression vector may be used to incorporate the desired sequences, readily available expression vectors include, without limitation: plasmids, such as pSClO1, pBR322, pBBR1MCS-3, pUR, pEX, pMR100, pCR4, pBAD24, pUC19, pRS426; and bacteriophages, such as Ml 3 phage and 2 phage. Of course, such expression vectors may only be suitable for particular host cells. One of ordinary skill in the art, however, can readily determine through routine experimentation whether any particular expression vector is suited for any given host cell. For example, the expression vector can be introduced into the host cell, which is then monitored for viability and expression of the sequences contained in the vector. In addition, reference may be made to the relevant texts and literature, which describe expression vectors and their suitability to any particular host cell.

[0107] Suitable expression vectors for the purposes of the invention, including the expression of the desired heterologous polypeptide, enzyme, and one or more catalytic domains described herein, include expression vectors containing the nucleic encoding the desired heterologous polypeptide, enzyme, or catalytic domain(s) operably linked to a constitutive or an inducible promoter. Examples of particularly suitable promoters for operable linkage to such polynucleotides include promoters from the following genes: gpdA, cbh1, Aspergillus oryzae TAKA amylase, Rhizomucor miehei aspartic proteinase, Aspergillus niger neutral alpha-amylase, Aspergillus niger acid stable alpha-amylase, Aspergillus niger glucoamylase (glaA), Aspergillus awamori glaA, Rhizomucor miehei lipase, Aspergillus oryzae alkaline protease, Aspergillus oryzae triose phosphate isomerase, Aspergillus nidulans acetamidase, Aspergillus oryzae acetamidase, Fusarium oxysporum trypsin-like protease, fungal endo α-L-arabinase (abnA), fungal α-L-arabinofuranosidase A (abfA), fungal α-L-arabinofuranosidase B (abfB), fungal xylanase (xlnA), fungal phytase, fungal ATP-synthetase, fungal subunit 9 (oliC), fungal triose phosphate isomerase (tpi), fungal alcohol dehydrogenase (adhA), fungal α-amylase (amy), fungal amyloglucosidase (glaA), fungal acetamidase (amdS), fungal glyceraldehyde-3-phosphate dehydrogenase (gpd), yeast alcohol dehydrogenase, yeast lactase, yeast 3-phosphoglycerate kinase, yeast triosephosphate isomerase, bacterial α-amylase, bacterial Spo2, and SSO. Examples of such suitable expression vectors and promoters are also described in PCT/EP2011/070956, the entire contents of which is hereby incorporated by reference herein.

[0108] In embodiments where the filamentous fungal cell contains a recombinant nucleic acid encoding an immunoglobulin or antibody, the filamentous fungal cell, for example, a Trichoderma fungal cell may have reduced or no expression of one or more regulatory protein encoding genes selected from prp1, prp2, ptf1, ptf2, ptf3, ptf4, ptf5, ptf6, ptf7, ptf8 ptf9 and ptf10.

[0109] In other embodiments, the filamentous fungal cell contains a recombinant polynucleotide encoding a growth factor, interferon, cytokine, or interleukin. In embodiments where the filamentous fungal cell, for example a Trichoderma fungal cell contains a recombinant polynucleotide encoding a growth factor, interferon, cytokine, human serum albumin, or interleukin, the filamentous fungal cell may have reduced or no expression of one or more regulatory protein encoding genes selected from prp1, prp2, ptf1, ptf2, ptf3, ptf4, ptf5, ptf6, per, ptf8 ptf9 and ptf10. In certain preferred embodiments, the growth factor is IGF-1 or the interferon is interferon-α 2b.

[0110] In embodiments where the filamentous fungal cell contains a recombinant nucleic acid encoding a non-mammalian polypeptide, the non-mammalian polypeptide may be an aminopeptidase, amylase, carbohydrase, carboxypeptidase, catalase, cellulase, chitinase, cutinase, deoxyribonuclease, esterase, alpha-galactosidase, beta-galactosidase, glucoamylase, alpha-glucosidase, beta-glucosidase, invertase, laccase, lipase, mutanase, oxidase, pectinolytic enzyme, peroxidase, phospholipase, phytase, polyphenoloxidase, proteolytic enzyme, ribonuclease, transglutaminase or xylanase. In embodiments where the filamentous fungal cell contains a recombinant nucleic acid encoding a non-mammalian polypeptide, the filamentous fungal cell or Trichoderma cell may have reduced or no detectable expression of one or more regulatory protein encoding genes selected from prp1, prp2, ptf1, ptf2, ptf3, ptf4, ptf5, ptf6, ptf7, ptf8 ptf9 and ptf10.

### Additional Modifications of the Glycosylation Pathway for Mimicking Human Glycosylation Pathway

[0111] In certain embodiments, the filamentous fungal cells or Trichoderma fungal cells of the present disclosure may have additional genetic modifications in their glycosylation pathway (glycoengineering).

[0112] Methods for modifying the glycosylation pathway of filamentous fungal cells, for example, Trichoderma cells, are disclosed in WO2012/069593, WO2013/102674, WO2013/174927, WO2015/004239, WO2015/001049 and WO2015/004241.

[0113] More specifically, in certain embodiments, the filamentous fungal cells or Trichoderma fungal cells of the present disclosure may have reduced or no activity of a dolichyl-P-Man:Man(5)GlcNAc(2)-PP-dolichyl mannosyltransferase. Dolichyl-P-Man:Man(5)GlcNAc(2)-PP-dolichyl mannosyltransferase (EC 2.4.1.130) transfers an alpha-D-mannosyl residue from dolichyl-phosphate D-mannose into a membrane lipid-linked oligosaccharide. Typically, the dolichyl-P-Man:Man(5)GlcNAc(2)-PP-dolichyl mannosyltransferase enzyme is encoded by an alg3 gene. Thus, in certain embodiments, the filamentous fungal cell has reduced or no activity of ALG3, which is the activity encoded by the alg3 gene. In some embodiments, the alg3 gene contains a mutation that reduces the corresponding ALG3 activity. In certain embodiments, the alg3 gene is deleted from the filamentous fungal cell.

[0114] In other embodiments, the filamentous fungal cells or Trichoderma fungal cells of the present disclosure further contain a polynucleotide encoding an α-1,2-mannosidase. The polynucleotide encoding the α-1,2-mannosidase may be endogenous in the host cell, or it may be heterologous to the host cell. These polynucleotides are especially useful for a filamentous fungal cell expressing high-mannose glycans transferred from the Golgi to the ER without effective exo-α-2-mannosidase cleavage. The α-1,2-mannosidase may be a mannosidase I type enzyme belonging to the glycoside hydrolase family 47 (cazy.org/GH47_all.html). In certain embodiments the α-1,2-mannosidase is an enzyme listed at cazy.org/GH47_characterized.html. In particular, the α-1,2-mannosidase may be an ER-type enzyme that cleaves glycoproteins such as enzymes in the subfamily of ER α-mannosidase I EC 3.2.1.113 enzymes. Examples of such enzymes include human α-2-mannosidase 1B (AAC26169), a combination of mammalian ER mannosidases, or a filamentous fungal enzyme such as α-1,2-mannosidase (MDS1) (T. reesei AAF34579; Maras M et al J Biotech. 77, 2000, 255). For ER/Golgi expression the catalytic domain of the mannosidase is typically fused with a targeting peptide, such as HDEL, KDEL, or part of an ER or early Golgi protein, or expressed with an endogenous ER targeting structures of an animal or plant mannosidase I enzyme, see, for example, Callewaert et al. 2001 Use of HDEL-tagged Trichoderma reesei mannosyl oligosaccharide 1,2-a-D-mannosidase for N-glycan engineering in Pichia pastoris. FEBS Lett 503: 173-178.

[0115] In further embodiments, the filamentous fungal cells or Trichoderma fungal cells of the present disclosure also contain an N-acetylglucosaminyltransferase I catalytic domain and an N-acetylglucosaminyltransferase II catalytic domain. Such catalytic domains are useful for expressing complex N-glycans in non-mammalian cells. N-acetylglucosaminyltransferase I (GlcNAc-TI; GnTI; EC 2.4.1.101) catalyzes the reaction UDP-N-acetyl-D-glucosamine+3-(alpha-D-mannosyl)-beta-D-mannosyl-R<=>UDP+3-(2-(N-acetyl-beta-D-glucosaminyl)-alpha-D-mannosyl)-beta-D-mannosyl-R, where R represents the remainder of the N-linked oligosaccharide in the glycan acceptor. An N-acetylglucosaminyltransferase I catalytic domain is any portion of an N-acetylglucosaminyltransferase I enzyme that is capable of catalyzing this reaction. N-acetylglucosaminyltransferase II (GlcNAc-TII; GnTII; EC 2.4.1.143) catalyzes the reaction UDP-N-acetyl-D-glucosamine+6-(alpha-D-mannosyl)-beta-D-mannosyl-R<=>UDP+6-(2-(N-acetyl-beta-D-glucosaminyl)-alpha-D-mannosyl)-beta-D-mannosyl-R, where R represents the remainder of the N-linked oligosaccharide in the glycan acceptor. An N-acetylglucosaminyltransferase II catalytic domain is any portion of an N-acetylglucosaminyltransferase II enzyme that is capable of catalyzing this reaction. Examples of suitable N-acetylglucosaminyltransferase I catalytic domains and an N-acetylglucosaminyltransferase II catalytic domains can be found in International Patent Application No. PCT/EP2011/070956. The N-acetylglucosaminyltransferase I catalytic domain and N-acetylglucosaminyltransferase II catalytic domain can be encoded by a single polynucleotide. In certain embodiments, the single polynucleotide encodes a fusion protein containing the N-acetylglucosaminyltransferase I catalytic domain and the N-acetylglucosaminyltransferase II catalytic domain. Alternatively, the N-acetylglucosaminyltransferase I catalytic domain can be encoded by a first polynucleotide and the N-acetylglucosaminyltransferase II catalytic domain can be encoded by a second polynucleotide.

[0116] In embodiments where, the filamentous fungal cell or Trichoderma fungal cell contains an N-acetylglucosaminyltransferase I catalytic domain and an N-acetylglucosaminyltransferase II catalytic domain, the cell can also contain a polynucleotide encoding a mannosidase II. Mannosidase II enzymes are capable of cleaving Man5 structures of GlcNAcMan5 to generate GlcNAcMan3, and if combined with action of a catalytic domain of GnTII, to generate G0; and further, with action of a catalytic domain of a galactosyltransferase, to generate G1 and G2. In certain embodiments mannosidase II-type enzymes belong to glycoside hydrolase family 38 (cazy.org/GH38_all.html). Examples of such enzymes include human enzyme AAC50302, D. melanogaster enzyme (Van den Elsen J. M. et al (2001) EMBO J. 20: 3008-3017), those with the 3D structure according to PDB-reference 1HTY, and others referenced with the catalytic domain in PDB. For ER/Golgi expression, the catalytic domain of the mannosidase is typically fused with an N-terminal targeting peptide, for example using targeting peptides listed in the International Patent Application No. PCT/EP2011/070956. After transformation with the catalytic domain of a mannosidase II-type mannosidase, a strain effectively producing GlcNAc2Man3, GlcNAc1Man3 or G0 is selected.

[0117] In certain embodiments that may be combined with the preceding embodiments, the filamentous fungal cell further contains a polynucleotide encoding a UDP-GlcNAc transporter.

[0118] In certain embodiments that may be combined with the preceding embodiments, the filamentous fungal cell further contains a polynucleotide encoding a β-1,4-galactosyltransferase. Generally, β-1,4-galactosyltransferases belong to the CAZy glycosyltransferase family 7 (cazy.org/GT7_all.html). Examples of useful β4GalT enzymes include β4GalT1, e.g. bovine Bos taurus enzyme AAA30534.1 (Shaper N. L. et al Proc. Natl. Acad. Sci. U.S.A. 83 (6), 1573-1577 (1986)), human enzyme (Guo S. et al. Glycobiology 2001, 11:813-20), and Mus musculus enzyme AAA37297 (Shaper, N. L. et al. 1998 J. Biol. Chem. 263 (21), 10420-10428). In certain embodiments of the invention where the filamentous fungal cell contains a polynucleotide encoding a galactosyltransferase, the filamentous fungal cell also contains a polynucleotide encoding a UDP-Gal 4 epimerase and/or UDP-Gal transporter. In certain embodiments of the invention where the filamentous fungal cell contains a polynucleotide encoding a galactosyltransferase, lactose may be used as the carbon source instead of glucose when culturing the host cell. The culture medium may be between pH 4.5 and 7.0 or between 5.0 and 6.5. In certain embodiments of the invention where the filamentous fungal cell contains a polynucleotide encoding a galactosyltransferase and, optionally, a polynucleotide encoding a UDP-Gal 4 epimerase and/or UDP-Gal transporter, a divalent cation such as Mn2+, Ca2+ or Mg2+ may be added to the cell culture medium.

[0119] In certain embodiments that may be combined with the preceding embodiments, the level of activity of alpha-1,6-mannosyltransferase in the host cell is reduced or eliminated compared to the level of activity in a wild-type host cell. In certain embodiments, the filamentous fungal has a reduced level of (or no) expression of an och1 gene compared to the level of expression in a wild-type filamentous fungal cell.

[0120] In certain embodiments, glycosyltransferases, or for example, GnTI, GnTII, or GalT or glycosylhydrolases, for example, α-1,2-mannosidase or mannosidase II, include a targeting peptide linked to the catalytic domains. The term “linked” as used herein means that two polymers of amino acid residues in the case of a polypeptide or two polymers of nucleotides in the case of a polynucleotide are either coupled directly adjacent to each other or are within the same polypeptide or polynucleotide but are separated by intervening amino acid residues or nucleotides. A “targeting peptide”, as used herein, refers to any number of consecutive amino acid residues of the recombinant protein that are capable of localizing the recombinant protein to the endoplasmic reticulum (ER) or Golgi apparatus (Golgi) within the filamentous fungal cell. The targeting peptide may be N-terminal or C-terminal to the catalytic domains. In certain embodiments, the targeting peptide is N-terminal to the catalytic domains. In certain embodiments, the targeting peptide provides direct binding to the ER or Golgi membrane. Components of the targeting peptide may come from any enzyme that normally resides in the ER or Golgi apparatus. Such enzymes include mannosidases, mannosyltransferases, glycosyltransferases, Type 2 Golgi proteins, and MNN2, MNN4, MNN6, MNN9, MNN10, MNS1, KRE2, VAN1, and OCH1 enzymes. Suitable targeting peptides are described in WO2013/102674. In one embodiment, the targeting peptide of GnTI or GnTII is human GnTII enzyme. In other embodiments, targeting peptide is derived from Trichoderma Kre2, Kre2-like, Och1, Anp1, and Van1.

[0121] In a specific embodiment, the filamentous fungal cell, for example a Trichoderma cell of the present disclosure, further comprises a polynucleotide encoding an α1,2 mannosidase, a mannosidase II, a galactosyltransferase, α1,6 fucosyltransferase, and/or GDP fucose synthesis activity.

[0122] Polynucleotides encoding GDP fucose synthesis activity includes GMD polynucleotide or a functional variant polynucleotide encoding a polypeptide having GDP-mannose-dehydratase activity; and, FX polynucleotide or a functional variant polynucleotide encoding a polypeptide having both GDP-keto-deoxy-mannose-epimerase and GDP-keto-deoxy-galactose-reductase activities. Optionally; polynucleotides encoding GDP fucose synthesis activity further includes GDP fucose transporter activity.

[0123] Polynucleotides encoding GPD fucose synthesis and α1,6 fucosyltransferase are disclosed in WO2013/174927.

### Heterologous Polypeptide Production

[0124] A heterologous polypeptide of interest is produced by filamentous fungal cells of the present disclosure having reduced or no activity of one or more of the regulatory proteins of the disclosure (e.g. of Table 1), for example by cultivating the cells in a nutrient medium for production of the heterologous polypeptide using methods known in the art.

[0125] It is therefore disclosed a method of improving heterologous polypeptide production in a Trichoderma cell expression system, comprising
[0126] a) providing a Trichoderma cell as disclosed above in which one or more regulatory proteins have reduced or eliminated activity, and further comprising a recombinant nucleic acid encoding said heterologous polypeptide,
[0127] b) culturing said Trichoderma cell for production of the heterologous polypeptide, wherein the heterologous polypeptide is produced at a higher yield when compared to the heterologous polypeptide produced in a corresponding parental Trichoderma cell in which said one or more regulatory proteins do not have reduced or eliminated activity.

[0128] It is further disclosed a method of making a heterologous polypeptide, comprising
[0129] a) providing a Trichoderma cell as disclosed above in which one or more regulatory proteins have reduced or eliminated activity;
[0130] b) culturing said Trichoderma cell for production and secretion of a heterologous polypeptide in the culture medium; and,
[0131] c) recovering and, optionally, purifying the heterologous polypeptide from the culture medium.

[0132] For example, the cells may be cultivated by shake flask cultivation, small-scale or large-scale fermentation (including continuous, batch, fed-batch, or solid state fermentations) in laboratory or industrial fermentors performed in a suitable medium and under conditions allowing the polypeptide to be expressed and/or isolated. The cultivation takes place in a suitable nutrient medium comprising carbon and nitrogen sources and inorganic salts, using procedures known in the art. Suitable media are available from commercial suppliers or may be prepared according to published compositions (e.g., in catalogues of the American Type Culture Collection). The secreted polypeptide can be recovered directly from the medium. If the polypeptide is not secreted, it may be obtained from cell lysates.

[0133] A heterologous polypeptide of interest produced by a filamentous fungal cell of the present disclosure containing reduced activity in at least one or more of the regulatory proteins of Table 1 may be detected using methods known in the art that are specific for the heterologous polypeptide. These detection methods may include, without limitation, use of specific antibodies, high performance liquid chromatography, capillary chromatography, formation of an enzyme product, disappearance of an enzyme substrate, and SDS-PAGE. For example, an enzyme assay may be used to determine the activity of an enzyme. Procedures for determining enzyme activity are known in the art for many enzymes (see, for example, O. Schomburg and M. Salzmann (eds.), Enzyme Handbook, Springer-Verlag, New York, 1990).

[0134] The resulting heterologous polypeptide may be isolated by methods known in the art. For example, a heterologous polypeptide of interest may be isolated from the cultivation medium by conventional procedures including, without limitation, centrifugation, filtration, extraction, spray-drying, evaporation, and precipitation. The isolated heterologous polypeptide may then be further purified by a variety of procedures known in the art including, without limitation, chromatography (e.g., ion exchange, affinity, hydrophobic, chromatofocusing, and size exclusion), electrophoretic procedures (e.g., preparative isoelectric focusing (IEF), differential solubility (e.g., ammonium sulfate precipitation), or extraction (see, for example, Protein Purification, J.-C. Janson and Lars Ryden, editors, VCH Publishers, New York, 1989).

[0135] In certain embodiments, a mammalian polypeptide, for example an immunoglobulin or antibody, is produced by the methods of the present disclosure at a level that is at least 2-fold; 3-fold, at least 4-fold, at least 5-fold, at least 6-fold, at least 7-fold, at least 8-fold, at least 9-fold, at least 10-fold, at least 15-fold, at least 20-fold, at least 25-fold, at least 30-fold, at least 40-fold, at least 50-fold, at least 60-fold, at least 70-fold, at least 75-fold, at least 80-fold, at least 90-fold, at least 100-fold, or a greater fold higher than the production level of the polypeptide in a corresponding parental filamentous fungal cell without the reduced regulatory protein activity. In other embodiments, the mammalian polypeptide is produced in a full length version at a level higher than the production level of the full-length version of the polypeptide in a corresponding parental filamentous fungal cell.

[0136] In certain embodiments, a non-mammalian polypeptide is produced at a level that is at least 2-fold, at least 3-fold, at least 4-fold, at least 5-fold, at least 6-fold, at least 7-fold, at least 8-fold, at least 9-fold, at least 10-fold, at least 15-fold, at least 20-fold, at least 25-fold, at least 30-fold, at least 40-fold, at least 50-fold, at least 60-fold, at least 70-fold, at least 75-fold, at least 80-fold, at least 90-fold, at least 100-fold, or a greater fold higher than the production level of the polypeptide in a corresponding parental filamentous fungal cell. In other embodiments, the non-mammalian polypeptide is produced in a full length version at a level higher than the production level of the full-length version of the polypeptide in a corresponding parental filamentous fungal cell.

siRNA Compounds of the Disclosure

[0137] In the above methods, the activity of the regulatory proteins of the disclosure may be reduced by contacting the cells, for example the Trichoderma cells, with siRNA compounds directed against one or more of the genes encoding said regulatory proteins.

[0138] As used herein the term “siRNA compound” refers to a small interfering RNA, shRNA, siNA, synthetic shRNA; miRNA compounds capable of down-regulating the expression of a gene, also referred as silencing.

[0139] The term “down-regulate” or “silencing” as used herein refers to reducing the expression of a gene or the activity of the product of such gene to an extent sufficient to achieve a desired biological or physiological effect. As used herein, the term “silencing” of a target gene means inhibition of the gene expression (transcription or translation) or polypeptide activity of the product of a target gene. “Gene product” as used herein, refers to a product of a gene such as an RNA transcript or a polypeptide. The terms “RNA transcript”, “mRNA polynucleotide sequence”, “mRNA sequence” and “mRNA” are used interchangeably.

[0140] siRNA compound may include oligomers with specific sequence complementary to a target gene of interest. As used herein, the term siRNA further refers to a plasmid or expression vector including one or more oligonucleotides encoding one or more siRNAs, operably linked to suitable promoters.

[0141] As used herein “oligomer” refers to a deoxyribonucleotide or ribonucleotide sequence from about 2 to about 50 nucleotides. Each DNA or RNA nucleotide may be independently natural or synthetic, and or modified or unmodified. Modifications include changes to the sugar moiety, the base moiety and or the linkages between nucleotides in the oligonucleotide. The compounds of the present invention encompass molecules comprising deoxyribonucleotides, ribonucleotides, modified deoxyribonucleotides, modified ribonucleotides, nucleotide analogues, modified nucleotide analogues, unconventional and abasic moieties and combinations thereof.

[0142] “Nucleotide” is meant to encompass deoxyribonucleotides and ribonucleotides, which may be natural or synthetic and modified or unmodified. Nucleotides include known nucleotide analogues, which are synthetic, naturally occurring, and non-naturally occurring. Examples of such analogs include, without limitation, phosphorothioates, phosphoramidites, methyl phosphonates, chiral-methyl phosphonates, 2′-O-methyl ribonucleotides, and peptide-nucleic acids (PNAs). Modifications include changes to the sugar moiety, the base moiety and or the linkages between ribonucleotides in the oligoribonucleotide. As used herein, the term “ribonucleotide” encompasses natural and synthetic, unmodified and modified ribonucleotides and ribonucleotide analogues which are synthetic, naturally occurring, and non-naturally occurring. Modifications include changes to the sugar moiety, to the base moiety and/or to the linkages between ribonucleotides in the oligonucleotide.

[0143] The nucleotides are selected from naturally occurring or synthetic modified bases. Naturally occurring bases include adenine, guanine, cytosine, thymine and uracil. Modified bases of nucleotides include inosine, xanthine, hypoxanthine, 2-aminoadenine, 6-methyl, 2-propyl and other alkyl adenines, 5-halouracil, 5-halocytosine, 6-azacytosine and 6-az thymine, pseudouracil, deoxypseudouracil, 4-thiouracil, ribo-2-thiouridine, ribo-4-thiouridine, 8-halo adenine, 8-aminoadenine, 8-thioladenine, 8-thiolalkyl adenines, 8-hydroxyl adenine and other 8-substituted adenines, 8-haloguanines, 8-aminoguanine, 8-thiolguanine, 8-thioalkylguanines 8-hydroxy lguanine and other substituted guanines, other aza and deaza adenines, other aza and deaza guanines, 5-methylribouridine, 5-trifluoromethyl uracil, 5-methylribocytosine, and 5-trifluorocytosine. In some embodiments one or more nucleotides in an oligomer is substituted with inosine.

[0144] In some embodiments the siRNA compound further comprises at least one modified ribonucleotide selected from the group consisting of a ribonucleotide having a sugar modification, a base modification or an internucleotide linkage modification and may contain DNA, and modified nucleotides such as LNA (locked nucleic acid), ENA (ethylene-bridged nucleic acid), PNA (peptide nucleic acid), arabinoside, phosphonocarboxylate or phosphinocarboxylate nucleotide (PACE nucleotide), or nucleotides with a 6 carbon sugar.

[0145] Modified deoxyribonucleotide includes, for example 5′OMe DNA (5-methyl-deoxyriboguanosine-3′-phosphate) which may be useful as a nucleotide in the 5′ terminal position (position number 1); PACE (deoxyriboadenosine 3′ phosphonoacetate, deoxyribocytidine 3′ phosphonoacetate, deoxyriboguanosine 3′ phosphonoacetate, deoxyribothymidine 3′ phosphonoacetate).

[0146] Bridged nucleic acids include LNA (2′-0, 4′-C-methylene bridged Nucleic Acid adenosine 3′ monophosphate, 2′-0,4′-C-methylene bridged Nucleic Acid 5-methyl-cytidine 3′ monophosphate, 2′-0,4′-C-methylene bridged Nucleic Acid guanosine 3′ monophosphate, 5-methyl-uridine (or thymidine) 3′ monophosphate); and ENA (2′-0,4′-C-ethylene bridged Nucleic Acid adenosine 3′ monophosphate, 2′-0,4′-C-ethylene bridged Nucleic Acid 5-methyl-cytidine 3′ monophosphate, 2′-0,4′-C-ethylene bridged Nucleic Acid guanosine 3′ monophosphate, 5-methyl-uridine (or thymidine) 3′ monophosphate).

[0147] All analogs of, or modifications to, a nucleotide/oligonucleotide are employed with the present invention, provided that said analog or modification does not substantially adversely affect the properties, e.g. function, of the nucleotide/oligonucleotide. Acceptable modifications include modifications of the sugar moiety, modifications of the base moiety, modifications in the internucleotide linkages and combinations thereof.

[0148] A sugar modification includes a modification on the 2′ moiety of the sugar residue and encompasses amino, fluoro, alkoxy (e.g. methoxy), alkyl, amino, fluoro, chloro, bromo, CN, CF, imidazole, carboxylate, thioate, CI to CIO lower alkyl, substituted lower alkyl, alkaryl or aralkyl, OCF3, OCN, 0-, S-, or N-alkyl; 0-, S-, or N-alkenyl; SOCH3; S02CH3; ON02; N02, N3; heterocycloalkyl; heterocycloalkaryl; aminoalkylamino; polyalkylamino or substituted silyl, as, among others, described in European patents EP 0 586 520 B1 or EP 0 618 925 B1.

[0149] In one embodiment the modified siRNA compound comprises at least one ribonucleotide comprising a 2′ modification on the sugar moiety (“2′ sugar modification”). In certain embodiments the siRNA compound comprises 2′O-alkyl or 2′-fluoro or 2′O-allyl or any other 2′ modification, optionally on alternate positions. Other stabilizing modifications are also possible (e.g. terminal modifications). In some embodiments a preferred 2′O-alkyl is 2′O-methyl (methoxy) sugar modification.

[0150] In some embodiments the backbone of the oligonucleotides is modified and comprises phosphate-D-ribose entities but may also contain thiophosphate-D-ribose entities, triester, thioate, 2′-5′ bridged backbone (also may be referred to as 5′-2′), PACE and the like.

[0151] As used herein, the terms “non-pairing nucleotide analog” means a nucleotide analog which comprises a non-base pairing moiety including but not limited to: 6 des amino adenosine (Nebularine), 4-Me-indole, 3-nitropyrrole, 5-nitroindole, Ds, Pa, N3-Me riboU, N3-Me riboT, N3-Me dC, N3-Me-dT, N1-Me-dG, N1-Me-dA, N3-ethyl-dC, N3-Me dC. In some embodiments the non-base pairing nucleotide analog is a ribonucleotide. In other embodiments the non-base pairing nucleotide analog is a deoxyribonucleotide. In addition, analogues of polynucleotides may be prepared wherein the structure of one or more nucleotide is fundamentally altered and better suited as therapeutic or experimental reagents. An example of a nucleotide analogue is a peptide nucleic acid (PNA) wherein the deoxyribose (or ribose) phosphate backbone in DNA (or RNA) is replaced with a polyamide backbone which is similar to that found in peptides. PNA analogues have been shown to be resistant to enzymatic degradation and to have enhanced stability in vivo and in vitro. Other modifications include polymer backbones, cyclic backbones, acyclic backbones, thiophosphate-D-ribose backbones, triester backbones, thioate backbones, 2′-5′ bridged backbone, artificial nucleic acids, morpholino nucleic acids, glycol nucleic acid (GNA), threose nucleic acid (TNA), arabinoside, and mirror nucleoside (for example, beta-L-deoxyribonucleoside instead of beta-D-deoxyribonucleoside). Examples of siRNA compounds comprising LNA nucleotides are disclosed in Elmen et al, (NAR 2005, 33(1):439-447).

[0152] In some embodiments the compounds of the present invention are synthesized with one or more inverted nucleotides, for example inverted thymidine or inverted adenosine (see, for example, Takei, et al, 2002, JBC 277(26):23800-06).

[0153] Other modifications include 3′ terminal modifications also known as capping moieties. Such terminal modifications are selected from a nucleotide, a modified nucleotide, a lipid, a peptide, a sugar and inverted abasic moiety. Such modifications are incorporated, for example at the 3′ terminus of the sense and/or antisense strands.

[0154] What is sometimes referred to in the present invention as an “abasic nucleotide” or “abasic nucleotide analog” is more properly referred to as a pseudo-nucleotide or an unconventional moiety. A nucleotide is a monomeric unit of nucleic acid, consisting of a ribose or deoxyribose sugar, a phosphate, and a base (adenine, guanine, thymine, or cytosine in DNA; adenine, guanine, uracil, or cytosine in RNA). A modified nucleotide comprises a modification in one or more of the sugar, phosphate and or base. The abasic pseudo-nucleotide lacks a base, and thus is not strictly a nucleotide.

[0155] The term “capping moiety” as used herein includes abasic ribose moiety, abasic deoxyribose moiety, modifications abasic ribose and abasic deoxyribose moieties including 2′ O alkyl modifications; inverted abasic ribose and abasic deoxyribose moieties and modifications thereof; C6-imino-Pi; a mirror nucleotide including L-DNA and L-RNA; 5′O-Me nucleotide; and nucleotide analogs including 4′,5′-methylene nucleotide; 1-(P-D-erythrofuranosyl)nucleotide; 4′-thionucleotide, carbocyclic nucleotide; 5′-amino-alkyl phosphate; 1,3-diamino-2-propyl phosphate, 3-aminopropyl phosphate; 6-aminohexyl phosphate; 12-aminododecyl phosphate; hydroxypropyl phosphate; 1,5-anhydrohexitol nucleotide; alpha-nucleotide; threo-pentofuranosyl nucleotide; acyclic 3′,4′-seco nucleotide; 3,4-dihydroxybutyl nucleotide; 3,5-dihydroxypentyl nucleotide, 5′-5′-inverted abasic moiety; 1,4-butanediol phosphate; 5′-amino; and bridging or non bridging methylphosphonate and 5′-mercapto moieties.

[0156] Certain preferred capping moieties are abasic ribose or abasic deoxyribose moieties; inverted abasic ribose or abasic deoxyribose moieties; C6-amino-Pi; a mirror nucleotide including L-DNA and L-R A.

[0157] A “hydrocarbon moiety or derivative thereof refers to straight chain or branched alkyl moieties and moieties per se or further comprising a functional group including alcohols, phosphodiester, phosphorothioate, phosphonoacetate and also includes amines, carboxylic acids, esters, amides aldehydes. “Hydrocarbon moiety” and “alkyl moiety” are used interchangeably.

[0158] “Terminal functional group” includes halogen, alcohol, amine, carboxylic, ester, amide, aldehyde, ketone, ether groups.

[0159] The term “unconventional moiety” as used herein refers to abasic ribose moiety, an abasic deoxyribose moiety, a deoxyribonucleotide, a modified deoxyribonucleotide, a mirror nucleotide, a non-base pairing nucleotide analog and a nucleotide joined to an adjacent nucleotide by a 2′-5′ internucleotide phosphate bond; bridged nucleic acids including locked nucleic acids (LNA) and ethylene bridged nucleic acids (ENA).

[0160] Abasic deoxyribose moiety includes for example abasic deoxyribose-3′-phosphate; 1,2-dideoxy-D-ribofuranose-3-phosphate; 1,4-anhydro-2-deoxy-D-ribitol-3-phosphate.

[0161] Inverted abasic deoxyribose moiety includes inverted deoxyriboabasic; 3′,5′ inverted deoxyabasic 5′-phosphate.

[0162] It is herein disclosed in particular a siRNA compounds including a siRNA, for example, one or more siRNAs directed against a gene encoding a regulatory protein selected from the group consisting of ptf1 (SEQ ID NO:1), prp1 (SEQ ID NO:2), ptf9 (SEQ ID NO:3), ptf3 (SEQ ID NO:4), ptf8 (SEQ ID NO:5), ptf5 (SEQ ID NO:6), ptf6 (SEQ ID NO:7), ptf2 (SEQ ID NO:8), ptf4 (SEQ ID NO:9), ptf10 (SEQ ID NO:10), prp2 (SEQ ID NO:12), and ptf7 (SEQ ID NO:11). Suitable siRNA sequences are disclosed in the Examples below.

[0163] Using public and proprietary algorithms the sequences of potential siRNAs are generated. siRNA molecules according to the above disclosures may thus be synthesized by any of the methods that are well known in the art for synthesis of ribonucleic (or deoxyribonucleic) oligonucleotides. Synthesis is commonly performed in a commercially available synthesizer (available, inter alia, from Applied Biosystems). Oligonucleotide synthesis is described for example in Beaucage and Iyer, Tetrahedron 1992; 48:2223-2311; Beaucage and Iyer, Tetrahedron 1993; 49: 6123-6194 and Caruthers, et. al, Methods Enzymol. 1987; 154: 287-313; the synthesis of thioates is, among others, described in Eckstein, Ann. Rev. Biochem. 1985; 54: 367-402, the synthesis of RNA molecules is described in Sproat, in Humana Press 2005 edited by Herdewijn P.; Kap. 2: 17-31 and respective downstream processes are, among others, described in Pingoud et al, in IRL Press 1989 edited by Oliver R. W. A.; Kap. 7: 183-208.

[0164] Other synthetic procedures are known in the art, e.g. the procedures described in Usman et al, 1987, J. Am. Chem. Soc, 109, 7845; Scaringe et al, 1990, NAR., 18, 5433; Wincott et al, 1995, NAR. 23, 2677-2684; and Wincott et al, 1997, Methods Mol. Bio., 74, 59, may make use of common nucleic acid protecting and coupling groups, such as dimethoxytrityl at the 5′-end, and phosphoramidites at the 3′-end. The modified (e.g. 2′-O-methylated) nucleotides and unmodified nucleotides are incorporated as desired.

[0165] In some embodiments the oligonucleotides or siRNA compounds of the present disclosure are synthesized separately and joined together post-synthetically, for example, by ligation (Moore et al., 1992, Science 256, 9923; Draper et al., International Patent Publication No. WO 93/23569; Shabarova et al, 1991, NAR 19, 4247; Bellon et al, 1997, Nucleosides & Nucleotides, 16, 951; Bellon et al, 1997, Bioconjugate Chem. 8, 204), or by hybridization following synthesis and/or deprotection.

[0166] In a specific embodiment, said siRNA compound of the present disclosure is further directed to a gene encoding a protease, for example as described in the above Table 2. Accordingly, the siRNA compounds include both one or more siRNA directed against one or more regulatory proteins of the disclosure, and one or more siRNA directed against one or more proteases.

[0167] More specifically, the siRNA compounds are directed against a gene encoding a regulatory protein of the present disclosure and a protease selected from the group consisting of pep4, pep8, pep9, pep11, slp5, cpa5, cpa2, cpa3, amp3, tpp1, pep12, amp2, mp1, mp2, mp3, mp4, mp5, amp1, sep1, slp2, slp3, slp6, slp7 and slp8. Suitable siRNA sequences are disclosed in the Examples.

[0168] Said siRNA compounds may be complexed with a cationic lipid carrier or other suitable carrier to increase the efficiency of siRNA transfection into a fungal cell, for example a Trichoderma cell comprising a recombinant nucleic acid encoding a heterologous polypeptide.

[0169] For silencing the gene encoding the regulatory proteins and/or proteases, the siRNA compounds may be introduced into the fungal cells of the present disclosure (i.e. transfected into the cells), by lipofection, electroporation or other appropriate techniques, in an amount sufficient to down-regulate the target genes of interest (regulatory proteins and/or proteases).

[0170] Further details of the methods for silencing the genes of interest with the siRNA compounds are given in the Examples below.

### Pharmaceutical Compositions Containing Heterologous Polypeptides Produced by Filamentous Fungal Cells of the Disclosure

[0171] In another aspect, the present invention provides a composition, e.g., a pharmaceutical composition, containing one or more heterologous polypeptides of interest, such as mammalian polypeptides, produced by the filamentous fungal cells of the present disclosure having reduced activity of one or more regulatory proteins of the disclosure (see e.g. Table 1) and further containing a recombinant polynucleotide encoding the heterologous polypeptide, formulated together with a pharmaceutically acceptable carrier. Pharmaceutical compositions of the invention also can be administered in combination therapy, i.e., combined with other agents. For example, the combination therapy can include a mammalian polypeptide of interest combined with at least one other therapeutic agent.

[0172] As used herein, “pharmaceutically acceptable carrier” includes any and all solvents, dispersion media, coatings, antibacterial and antifungal agents, isotonic and absorption delaying agents, and the like that are physiologically compatible. Preferably, the carrier is suitable for intravenous, intramuscular, subcutaneous, parenteral, spinal or epidermal administration (e.g., by injection or infusion). Depending on the route of administration, the active compound, i.e., the mammalian polypeptide of interest may be coated in a material to protect the compound from the action of acids and other natural conditions that may inactivate the compound.

[0173] The pharmaceutical compositions of the invention may include one or more pharmaceutically acceptable salts. A “pharmaceutically acceptable salt” refers to a salt that retains the desired biological activity of the parent compound and does not impart any undesired toxicological effects (see e.g., Berge, S. M., et al. (1977) J. Pharm. Sci. 66:1-19). Examples of such salts include acid addition salts and base addition salts. Acid addition salts include those derived from nontoxic inorganic acids, such as hydrochloric, nitric, phosphoric, sulfuric, hydrobromic, hydroiodic, phosphorous and the like, as well as from nontoxic organic acids such as aliphatic mono- and dicarboxylic acids, phenyl-substituted alkanoic acids, hydroxy alkanoic acids, aromatic acids, aliphatic and aromatic sulfonic acids and the like. Base addition salts include those derived from alkaline earth metals, such as sodium, potassium, magnesium, calcium and the like, as well as from nontoxic organic amines, such as N,N′-dibenzylethylenediamine, N-methylglucamine, chloroprocaine, choline, diethanolamine, ethylenediamine, procaine and the like.

[0174] A pharmaceutical composition of the invention also may also include a pharmaceutically acceptable antioxidant. Examples of pharmaceutically acceptable antioxidants include: (1) water soluble antioxidants, such as ascorbic acid, cysteine hydrochloride, sodium bisulfate, sodium metabisulfite, sodium sulfite and the like; (2) oil-soluble antioxidants, such as ascorbyl palmitate, butylated hydroxyanisole (BHA), butylated hydroxytoluene (BHT), lecithin, propyl gallate, alpha-tocopherol, and the like; and (3) metal chelating agents, such as citric acid, ethylenediamine tetraacetic acid (EDTA), sorbitol, tartaric acid, phosphoric acid, and the like.

[0175] Examples of suitable aqueous and nonaqueous carriers that may be employed in the pharmaceutical compositions of the invention include water, ethanol, polyols (such as glycerol, propylene glycol, polyethylene glycol, and the like), and suitable mixtures thereof, vegetable oils, such as olive oil, and injectable organic esters, such as ethyl oleate. Proper fluidity can be maintained, for example, by the use of coating materials, such as lecithin, by the maintenance of the required particle size in the case of dispersions, and by the use of surfactants.

[0176] These compositions may also contain adjuvants such as preservatives, wetting agents, emulsifying agents and dispersing agents. Prevention of presence of microorganisms may be ensured both by sterilization procedures, and by the inclusion of various antibacterial and antifungal agents, for example, paraben, chlorobutanol, phenol sorbic acid, and the like. It may also be desirable to include isotonic agents, such as sugars, sodium chloride, and the like into the compositions. In addition, prolonged absorption of the injectable pharmaceutical form may be brought about by the inclusion of agents which delay absorption such as aluminum monostearate and gelatin.

[0177] Pharmaceutically acceptable carriers include sterile aqueous solutions or dispersions and sterile powders for the extemporaneous preparation of sterile injectable solutions or dispersion. The use of such media and agents for pharmaceutically active substances is known in the art. Except insofar as any conventional media or agent is incompatible with the active compound, use thereof in the pharmaceutical compositions of the invention is contemplated. Supplementary active compounds can also be incorporated into the compositions.

[0178] Therapeutic compositions typically must be sterile and stable under the conditions of manufacture and storage. The composition can be formulated as a solution, microemulsion, liposome, or other ordered structure suitable to high drug concentration. The carrier can be a solvent or dispersion medium containing, for example, water, ethanol, polyol (for example, glycerol, propylene glycol, and liquid polyethylene glycol, and the like), and suitable mixtures thereof. The proper fluidity can be maintained, for example, by the use of a coating such as lecithin, by the maintenance of the required particle size in the case of dispersion and by the use of surfactants. In many cases, it will be preferable to include isotonic agents, for example, sugars, polyalcohols such as mannitol, sorbitol, or sodium chloride in the composition. Prolonged absorption of the injectable compositions can be brought about by including in the composition an agent that delays absorption, for example, monostearate salts and gelatin.

[0179] Sterile injectable solutions can be prepared by incorporating the active compound in the required amount in an appropriate solvent with one or a combination of ingredients enumerated above, as required, followed by sterilization microfiltration. Generally, dispersions are prepared by incorporating the active compound into a sterile vehicle that contains a basic dispersion medium and the required other ingredients from those enumerated above. In the case of sterile powders for the preparation of sterile injectable solutions, the certain methods of preparation are vacuum drying and freeze-drying (lyophilization) that yield a powder of the active ingredient plus any additional desired ingredient from a previously sterile-filtered solution thereof.

[0180] The amount of active ingredient which can be combined with a carrier material to produce a single dosage form will vary depending upon the subject being treated, and the particular mode of administration. The amount of active ingredient which can be combined with a carrier material to produce a single dosage form will generally be that amount of the composition which produces a therapeutic effect. Generally, out of one hundred percent, this amount will range from about 0.01 percent to about ninety-nine percent of active ingredient, preferably from about 0.1 percent to about 70 percent, most preferably from about 1 percent to about 30 percent of active ingredient in combination with a pharmaceutically acceptable carrier.

[0181] Dosage regimens are adjusted to provide the optimum desired response (e.g., a therapeutic response). For example, a single bolus may be administered, several divided doses may be administered over time or the dose may be proportionally reduced or increased as indicated by the exigencies of the therapeutic situation. It is especially advantageous to formulate parenteral compositions in dosage unit form for ease of administration and uniformity of dosage. Dosage unit form as used herein refers to physically discrete units suited as unitary dosages for the subjects to be treated; each unit contains a predetermined quantity of active compound calculated to produce the desired therapeutic effect in association with the required pharmaceutical carrier. The specification for the dosage unit forms of the invention are dictated by and directly dependent on (a) the unique characteristics of the active compound and the particular therapeutic effect to be achieved, and (b) the limitations inherent in the art of compounding such an active compound for the treatment of sensitivity in individuals.

[0182] For administration of a mammalian polypeptide of interest, in particular where the mammalian polypeptide is an antibody, the dosage ranges from about 0.0001 to 100 mg/kg, and more usually 0.01 to 5 mg/kg, of the host body weight. For example, dosages can be 0.3 mg/kg body weight, 1 mg/kg body weight, 3 mg/kg body weight, 5 mg/kg body weight or 10 mg/kg body weight or within the range of 1-10 mg/kg. An exemplary treatment regime entails administration once per week, once every two weeks, once every three weeks, once every four weeks, once a month, once every 3 months or once every three to 6 months. Certain dosage regimens for an antibody may include 1 mg/kg body weight or 3 mg/kg body weight via intravenous administration, with the antibody being given using one of the following dosing schedules: (i) every four weeks for six dosages, then every three months; (ii) every three weeks; (iii) 3 mg/kg body weight once followed by 1 mg/kg body weight every three weeks.

[0183] Alternatively a mammalian polypeptide of interest can be administered as a sustained release formulation, in which case less frequent administration is required. Dosage and frequency vary depending on the half-life of the administered substance in the patient. In general, human antibodies show the longest half life, followed by humanized antibodies, chimeric antibodies, and nonhuman antibodies. The dosage and frequency of administration can vary depending on whether the treatment is prophylactic or therapeutic. In prophylactic applications, a relatively low dosage is administered at relatively infrequent intervals over a long period of time. Some patients continue to receive treatment for the rest of their lives. In therapeutic applications, a relatively high dosage at relatively short intervals is sometimes required until progression of the disease is reduced or terminated, and preferably until the patient shows partial or complete amelioration of symptoms of disease. Thereafter, the patient can be administered a prophylactic regime.

[0184] Actual dosage levels of the active ingredients in the pharmaceutical compositions of the present disclosure may be varied so as to obtain an amount of the active ingredient which is effective to achieve the desired therapeutic response for a particular patient, composition, and mode of administration, without being toxic to the patient. The selected dosage level will depend upon a variety of pharmacokinetic factors including the activity of the particular compositions of the present invention employed, or the ester, salt or amide thereof, the route of administration, the time of administration, the rate of excretion of the particular compound being employed, the duration of the treatment, other drugs, compounds and/or materials used in combination with the particular compositions employed, the age, sex, weight, condition, general health and prior medical history of the patient being treated, and like factors well known in the medical arts.

[0185] A “therapeutically effective dosage” of an immunoglobulin of the present disclosure preferably results in a decrease in severity of disease symptoms, an increase in frequency and duration of disease symptom-free periods, or a prevention of impairment or disability due to the disease affliction. For example, for the treatment of tumors, a “therapeutically effective dosage” preferably inhibits cell growth or tumor growth by at least about 20%, more preferably by at least about 40%, even more preferably by at least about 60%, and still more preferably by at least about 80% relative to untreated subjects. The ability of a compound to inhibit tumor growth can be evaluated in an animal model system predictive of efficacy in human tumors. Alternatively, this property of a composition can be evaluated by examining the ability of the compound to inhibit, such inhibition in vitro by assays known to the skilled practitioner. A therapeutically effective amount of a therapeutic compound can decrease tumor size, or otherwise ameliorate symptoms in a subject. One of ordinary skill in the art would be able to determine such amounts based on such factors as the subject's size, the severity of the subject's symptoms, and the particular composition or route of administration selected.

[0186] A composition of the present disclosure can be administered via one or more routes of administration using one or more of a variety of methods known in the art. As will be appreciated by the skilled artisan, the route and/or mode of administration will vary depending upon the desired results. Certain routes of administration for binding moieties of the invention include intravenous, intramuscular, intradermal, intraperitoneal, subcutaneous, spinal or other parenteral routes of administration, for example by injection or infusion. The phrase “parenteral administration” as used herein means modes of administration other than enteral and topical administration, usually by injection, and includes, without limitation, intravenous, intramuscular, intraarterial, intrathecal, intracapsular, intraorbital, intracardiac, intradermal, intraperitoneal, transtracheal, subcutaneous, subcuticular, intraarticular, subcapsular, subarachnoid, intraspinal, epidural and intrasternal injection and infusion.

[0187] Alternatively, a mammalian polypeptide according to the present disclosure can be administered via a nonparenteral route, such as a topical, epidermal or mucosal route of administration, for example, intranasally, orally, vaginally, rectally, sublingually or topically.

[0188] The active compounds can be prepared with carriers that will protect the compound against rapid release, such as a controlled release formulation, including implants, transdermal patches, and microencapsulated delivery systems. Biodegradable, biocompatible polymers can be used, such as ethylene vinyl acetate, polyanhydrides, polyglycolic acid, collagen, polyorthoesters, and polylactic acid. Many methods for the preparation of such formulations are patented or generally known to those skilled in the art. (see, e.g., Sustained and Controlled Release Drug Delivery Systems, J. R. Robinson, ed., Marcel Dekker, Inc., New York, 1978).

[0189] Therapeutic compositions can be administered with medical devices known in the art.

[0190] For example, in a certain embodiment, a therapeutic composition of the invention can be administered with a needleless hypodermic injection device, such as the devices disclosed in U.S. Pat. Nos. 5,399,163; 5,383,851; 5,312,335; 5,064,413; 4,941,880; 4,790,824; or 4,596,556. Examples of well-known implants and modules useful in the present invention include: U.S. Pat. No. 4,487,603, which discloses an implantable micro-infusion pump for dispensing medication at a controlled rate; U.S. Pat. No. 4,486,194, which discloses a therapeutic device for administering medicants through the skin; U.S. Pat. No. 4,447,233, which discloses a medication infusion pump for delivering medication at a precise infusion rate; U.S. Pat. No. 4,447,224, which discloses a variable flow implantable infusion apparatus for continuous drug delivery; U.S. Pat. No. 4,439,196, which discloses an osmotic drug delivery system having multi-chamber compartments; and U.S. Pat. No. 4,475,196, which discloses an osmotic drug delivery system.

[0191] In certain embodiments, the use of mammalian polypeptides according to the present disclosure is for the treatment of any disease that may be treated with therapeutic antibodies.

### Uses of the Filamentous Fungal Cells of the Invention

[0192] The invention herein further relates to the use of any of the filamentous fungal cells of the present disclosure, such as Trichoderma fungal cells, that have reduced or no activity of one or more of the regulatory proteins of the disclosure (see e.g. Table 1), and that contain a recombinant polynucleotide encoding a heterologous polypeptide, such as a mammalian polypeptide, for producing said heterologous polypeptide at high level, or for improving heterologous polypeptide stability and for making a heterologous polypeptide. Methods of measuring protein production and for making a heterologous polypeptide are well known, and include, without limitation, all the methods and techniques described in the present disclosure.

[0193] Accordingly, certain embodiments of the present disclosure relate to methods of improving heterologous polypeptide production, by: a) providing a filamentous fungal cell of the present disclosure having reduced or no activity of one or more of the regulatory proteins selected from ptf1 (SEQ ID NO:1), prp1 (SEQ ID NO:2), ptf9 (SEQ ID NO:3), ptf3 (SEQ ID NO:4), ptf8 (SEQ ID NO:5), ptf5 (SEQ ID NO:6), ptf6 (SEQ ID NO:7), ptf2 (SEQ ID NO:8), ptf4 (SEQ ID NO:9), ptf10 (SEQ ID NO:10), prp2 (SEQ ID NO:12), and ptf7 (SEQ ID NO:11), and where the cell further contains a recombinant polynucleotide encoding a heterologous polypeptide; and b) culturing the cell such that the heterologous polypeptide is produced, where the heterologous polypeptide is produced at a higher yield and/or increased stability when compared to the yield of the same heterologous polypeptide produced in a host cell in which said one or more regulatory proteins do not have reduced or no activity, for example, in a host cell not containing any mutations of the genes encoding the regulatory proteins, that reduce or eliminate the expression of said regulatory proteins.

[0194] Other embodiments of the present disclosure relate to methods of improving mammalian polypeptide stability, by: a) providing a Trichoderma fungal cell of the present disclosure having reduced or no activity of one or more of the regulatory proteins selected from ptf1 (SEQ ID NO:1), prp1 (SEQ ID NO:2), ptf9 (SEQ ID NO:3), ptf3 (SEQ ID NO:4), ptf8 (SEQ ID NO:5), ptf5 (SEQ ID NO:6), ptf6 (SEQ ID NO:7), ptf2 (SEQ ID NO:8), ptf4 (SEQ ID NO:9), ptf10 (SEQ ID NO:10), prp2 (SEQ ID NO:12), and ptf7 (SEQ ID NO:11), where the cell further contains a recombinant polynucleotide encoding a mammalian polypeptide; and b) culturing the cell such that the mammalian polypeptide is expressed, where the mammalian polypeptide has increased stability compared to a host cell not containing the mutations of the genes encoding the proteases.

[0195] The filamentous fungal cell or Trichoderma fungal cell may be any cell described in the section entitled “Filamentous Fungal Cells of the Invention”.

[0196] Other embodiments of the present disclosure relate to methods of making a heterologous polypeptide, by: a) providing a filamentous fungal cell, for example a Trichoderma cell of the present disclosure having reduced or no activity in said one or more regulatory protein selected from the group consisting of one or more of the regulatory proteins selected from ptf1 (SEQ ID NO:1), prp1 (SEQ ID NO:2), ptf9 (SEQ ID NO:3), ptf3 (SEQ ID NO:4), ptf8 (SEQ ID NO:5), ptf5 (SEQ ID NO:6), ptf6 (SEQ ID NO:7), ptf2 (SEQ ID NO:8), ptf4 (SEQ ID NO:9), ptf10 (SEQ ID NO:10), prp2 (SEQ ID NO:12), and ptf7 (SEQ ID NO:11), where the cell further contains a recombinant polynucleotide encoding a heterologous polypeptide; b) culturing the host cell such that the heterologous polypeptide is produced and secreted in the culture medium; and c) recovering and, optionally, purifying the heterologous polypeptide.

[0197] Methods of culturing filamentous fungal and Trichoderma fungal cells and purifying polypeptides are well known in the art, and include, without limitation, all the methods and techniques described in the present disclosure.

[0198] In certain embodiments, the filamentous fungal cell or Trichoderma fungal cell is cultured at a pH range selected from pH 3.5 to 7; pH 3.5 to 6.5; pH 4 to 6; pH 4.3 to 5.7; pH 4.4 to 5.6; and pH 4.5 to 5.5. In certain embodiments, to produce an antibody the filamentous fungal cell or Trichoderma fungal cell is cultured at a pH range selected from 4.7 to 6.5; pH 4.8 to 6.0; pH 4.9 to 5.9; and pH 5.0 to 5.8.

[0199] In some embodiments, the heterologous polypeptide is a mammalian polypeptide. In other embodiments, the heterologous polypeptide is a non-mammalian polypeptide.

[0200] In certain embodiments, the mammalian polypeptide is selected from an immunoglobulin, immunoglobulin heavy chain, an immunoglobulin light chain, a monoclonal antibody, a hybrid antibody, an F(ab′)2 antibody fragment, an F(ab) antibody fragment, an Fv molecule, a single-chain Fv antibody, a dimeric antibody fragment, a trimeric antibody fragment, a functional antibody fragment, a single domain antibody, multimeric single domain antibodies, an immunoadhesin, insulin-like growth factor 1, a growth hormone, insulin, and erythropoietin. In other embodiments, the mammalian protein is an immunoglobulin or insulin-like growth factor 1. In yet other embodiments, the mammalian protein is an antibody. In further embodiments, the yield of the mammalian polypeptide is at least 0.5, at least 1, at least 2, at least 3, at least 4, or at least 5 grams per liter. In certain embodiments, the mammalian polypeptide is an antibody, optionally, IgG1, IgG2, IgG3, or IgG4. In further embodiments, the yield of the antibody is at least 0.5, at least 1, at least 2, at least 3, at least 4, or at least 5 grams per liter. In still other embodiments, the mammalian polypeptide is a growth factor or a cytokine. In further embodiments, the yield of the growth factor or cytokine is at least 0.1, at least 0.2, at least 0.3, at least 0.4, at least 0.5, at least 1, at least 1.5, at least 2, at least 3, at least 4, or at least 5 grams per liter. In further embodiments, the mammalian polypeptide is an antibody, and the antibody contains at least 70%, at least 80%, at least 90%, at least 95%, or at least 98% of a natural antibody C-terminus and N-terminus without additional amino acid residues. In other embodiments, the mammalian polypeptide is an antibody, and the antibody contains at least 70%, at least 80%, at least 90%, at least 95%, or at least 98% of a natural antibody C-terminus and N-terminus that do not lack any C-terminal or N-terminal amino acid residues

[0201] In certain embodiments where the mammalian polypeptide is purified from cell culture, the culture containing the mammalian polypeptide contains polypeptide fragments that make up a mass percentage that is less than 50%, less than 40%, less than 30%, less than 20%, or less than 10% of the mass of the produced polypeptides. In certain preferred embodiments, the mammalian polypeptide is an antibody, and the polypeptide fragments are heavy chain fragments and/or light chain fragments. In other embodiments, where the mammalian polypeptide is an antibody and the antibody purified from cell culture, the culture containing the antibody contains free heavy chains and/or free light chains that make up a mass percentage that is less than 50%, less than 40%, less than 30%, less than 20%, or less than 10% of the mass of the produced antibody. Methods of determining the mass percentage of polypeptide fragments are well known in the art and include, measuring signal intensity from an SDS-gel.

[0202] In further embodiments, the non-mammalian polypeptide is selected from an aminopeptidase, amylase, carbohydrase, carboxypeptidase, catalase, cellulose, chitinase, cutinase, deoxyribonuclease, esterase, alpha-galactosidase, beta-galactosidase, glucoamylase, alpha-glucosidase, beta-glucosidase, invertase, laccase, lipase, mutanase, oxidase, pectinolytic enzyme, peroxidase, phospholipase, phytase, polyphenoloxidase, proteolytic enzyme, ribonuclease, transglutaminase, and xylanase.

[0203] In certain embodiments of any of the disclosed methods, the method includes the further step of providing one or more, two or more, three or more, four or more, or five or more protease inhibitors. In certain embodiments, the protease inhibitors are peptides that are co-expressed with the mammalian polypeptide. In other embodiments, the inhibitors are siRNA compounds which inhibit at least two, at least three, or at least four proteases from a protease family selected from aspartic proteases, trypsin-like serine proteases, subtilisin proteases, and glutamic proteases.

[0204] In certain embodiments of any of the disclosed methods, the filamentous fungal cell or Trichoderma fungal cell also contains a carrier protein. As used herein, a “carrier protein” is portion of a protein that is endogenous to and highly secreted by a filamentous fungal cell or Trichoderma fungal cell. Suitable carrier proteins include, without limitation, those of T. reesei mannanase I (Man5A, or MANI), T. reesei cellobiohydrolase II (Cel6A, or CBHII) (see, e.g., Paloheimo et al Appl. Environ. Microbiol. 2003 December; 69(12): 7073-7082) or T. reesei cellobiohydrolase I (CBHI). In some embodiments, the carrier protein is CBH1. In other embodiments, the carrier protein is a truncated T. reesei CBH1 protein that includes the CBH1 core region and part of the CBH1 linker region. In some embodiments, a carrier such as a cellobiohydrolase or its fragment is fused to an antibody light chain and/or an antibody heavy chain. In some embodiments, a carrier such as a cellobiohydrolase or its fragment is fused to insulin-like growth factor 1, growth hormone, insulin, interferon alpha 2b, fibroblast growth factor 21, or human serum albumin. In some embodiments, a carrier-antibody fusion polypeptide comprises a Kex2 cleavage site. In certain embodiments, Kex2, or other carrier cleaving enzyme, is endogenous to a filamentous fungal cell. In certain embodiments, carrier cleaving protease is heterologous to the filamentous fungal cell, for example, another Kex2 protein derived from yeast or a TEV protease. In certain embodiments, carrier cleaving enzyme is overexpressed.

[0205] It is to be understood that, while the invention has been described in conjunction with the certain specific embodiments thereof, the foregoing description is intended to illustrate and not limit the scope of the invention. Other aspects, advantages, and modifications within the scope of the invention will be apparent to those skilled in the art to which the invention pertains.

[0206] The invention having been described, the following examples are offered to illustrate the subject invention by way of illustration, not by way of limitation.

### EXAMPLES

### Example 1. Protease Induction Studies

[0207] To search for transcriptional regulators of proteases in Trichoderma reesei, an induction experiments were performed to upregulate protease expression and activity. Addition of 10 g/l casamino acids or 4 g/l peptone to Trichoderma minimal medium (TrMM) containing lactose and 20 g/l spent grain extract medium increased the total protease activity in the culture supernatants of the M180 Trichoderma reesei strain producing a monoclonal antibody MAB01 (no regulatory proteins or proteases are deleted in the M180 strain).

[0208] The M180 strain was grown in 2 liter flasks with 250 ml of TrMM, 40 g/l lactose, 20 g/l spent grain extract, supplemented with 100 mM PIPPS pH 5.5. The culture was grown up so that the dry weight was 0.8 g/l. The whole batch of growing mycelia was pooled and equally distributed resulting to 250 ml in four replicate 2 liter flasks per treatment. Protease induction was started by addition of casamino acids or peptone. A mock induction was done with buffer for the uninduced cultures. Casamino acids were added to give a final concentration of 10 g/l and peptone was added to give a final concentration of 4 g/l.

[0209] The flasks were sampled after adding the inducers so the zero time point is several minutes after induction began. In total 40 ml samples were taken at 0, 8 hours, 20 hours and 48 hours post induction, the mycelium was isolated, and frozen in liquid nitrogen subsequent RNA isolation (altogether for each time point there were 4 samples taken from 4 independent flasks).

[0210] Custom-made microarray slides from RocheNimbleGen were used for transcriptional profiling. Sample preparation, hybridization onto microarray slides and collection of raw data was carried out according to the manufacturer's protocols. The microarray data were analyzed using the R package Oligo for preprocessing of the data and the package Limma for identifying differentially expressed genes. In the analysis of the differentially expressed genes, the signals in the samples of the induced cultures were compared to the ones in the uninduced control cultures at the corresponding time point. Four biological replicates of each condition and time point were analyzed. In addition, the expression array datasets were clustered using the R package Mfuzz. Co-expressed genomic clusters were determined by enrichment of Mfuzz cluster members in the same genomic regions.

[0211] The expression data was clustered into 100 groups to find out what genes are co-regulated upon the different treatment. The samples clustered as expected. The early time points 0 and 8 hours are clearly separated from the 20 and 48 hour time points. At 8 hours there are distinguishable differences between the induced cultures and the uninduced control. At 20 hours the induced cultures are most different compared to the control cultures. After 48 hours the peptone induced cultures have become more like the control cultures. This would indicate that the peptone has been used up and the cultures are equilibrating to become more like the untreated control. In the further analysis we focused on time points where both treatments would give upregulation of protease genes and regulatory factors. There was some activity at 8 hours, but the majority of information was gathered from the 20 hour time point.

[0212] At 20 hours there were 956 genes that were upregulated at least 1.4-fold in both treatments using a p-value=0.01. At 8 hours there were 375 genes similarly upregulated. From these, 26 protease genes were upregulated in total, while 20 were upregulated in both treatments at 20 hours. Only 6 proteases were upregulated in total, with 3 of the same upregulated in both treatments at 8 hours. 41 transcription factors/regulating proteins were found to be upregulated at least 1.4-fold in both treatments at 20 hours, while there were only 14 similar genes at 8 hours.

[0213] To narrow down the selection, the transcription factors were located on the scaffold to see if they were physically near to any protease genes. 7 transcription factor/regulators were found to be near at least 2 protease genes. Combining this analysis with the clustering data revealed that 3 of the 7 transcription factors cluster with 3 or more protease genes. Table 3 below summarizes the candidate transcriptional regulators. The most interesting genes are the transcription factors tre3449 and tre108940, and the regulatory protein tre122069. The protease genes found in the same expression clusters are listed in Table 4. For example, the transcription factor tre3449 is next to tre121306 aspartic protease on the gene scaffold, which could suggest a relationship between the regulator and the gene.

TABLE 3
Candidate transcription factors/regulatory proteins that are involved in upregulating
protease expression. The time point is indicated along with the number of protease genes that the
transcription factor/regulatory protein clusters with and the number of protease genes nearby the
gene locus.

| | | Protease | | | |
|---|---|---|---|---|---|
| Time | Proteases | genes | | | SEQ ID |
| point | in cluster | nearby | Gene # | Gene description | NO: |
| 20 h | 2 | 2 | tre59740 | Fungal transcriptional regulatory protein, N- | |
| | | | | terminal | |
| 20 h | 3 | 2 | tre3449 | Fungal transcriptional regulatory protein, N- | |
| | | | | terminal | |
| 20 h | 1 | 2 | tre106706 | Fungal transcriptional regulatory protein, N- | |
| | | | | terminal | |
| 20 h | 7 | 2 | tre122069 | BTB/POZ | |
| 20 h | 4 | 2 | tre108940 | Fungal transcriptional regulatory protein, N- | |
| | | | | terminal | |
| 20 h | 1 | 2 | tre103158 | Fungal specific transcription factor | |
| 20 h | 2 | 1 | tre103275 | Zn-finger, C2H2 type | |
| 20 h | 1 | 1 | tre105269 | Fungal transcriptional regulatory protein, N- | |
| | | | | terminal | |
| 20 h | 2 | 1 | tre76505 | Zn-finger, C2H2 type | |
| 8 h | 2 | 2 | tre121130 | Fungal transcriptional regulatory protein, N- | |
| | | | | terminal | |
| 8 h | 3 | 1 | tre106259 | Fungal specific transcription factor | |
| 8 h | 3 | 1 | tre102947 | BTB/POZ | |

[0214] The dataset was reduced down to only regulatory proteins, and protease genes and clustered again to find out what genes were co-regulated within a smaller set of data. There were two clustering sets of genes including these three factors. The tre3449 and tre122069 strongly clustered together along with several protease genes and one transcription factor tre76505. The tre108940 gene clusters well with several of the most major proteases and with another transcription factor tre106706. These genes appear to be co-regulated and are listed in Table 5.

[0215] There were at least 17 protease genes that were upregulated at least 2-fold upon induction with casamino acids or peptone (Table 6). The majority of the induction occurred at 20 hours. At 48 hours, there was still induction from the casamino acids, but in the peptone treated cultures the protease expression went back to normal. The most highly upregulated proteases with high transcription levels included tsp1, slp1, pep1, pep2, pep5, pep10, and pep11.

TABLE 6
Protease genes that were upregulated at least 2-fold after induction with 1% casamino
acids or 0.4% peptone at different time points in the induction study.

| | | p = 0.01, >2 fold | | | | | | | | |
|---|---|---|---|---|---|---|---|---|---|---|
| | | 1% casamino acid | | | 0.4% peptone | | | Control signal intensity | | |
| | | 8 hr | 20 hr | 48 hr | 8 hr | 20 hr | 48 hr | 8 hr | 20 hr | 48 hr |
| tpp1 | tre0082623 | 0 | 1 | 0 | 0 | 1 | 0 | 14.3 | 10.8 | 8.8 |
| tsp1 | tre0073897 | 0 | 0 | 1 | 0 | 1 | 0 | 9.2 | 8.2 | 9.0 |
| sep1 | tre0124051 | −1 | 1 | 0 | −1 | 1 | 0 | 12.6 | 10.0 | 7.8 |
| slp1 | tre0051365 | 0 | 1 | 0 | 0 | 1 | 0 | 13.8 | 12.8 | 12.4 |
| pep1 | tre0074156 | −1 | 1 | 1 | −1 | 1 | 0 | 13.2 | 12.3 | 8.4 |
| pep10 | tre0078639 | 0 | 0 | 1 | 0 | 0 | 0 | 11.1 | 12.7 | 9.6 |
| pep11 | tre0121306 | 0 | 0 | 1 | 0 | 0 | 0 | 14.0 | 13.0 | 10.7 |
| pep2 | tre0053961 | 1 | 1 | 0 | 1 | 1 | 0 | 10.3 | 8.9 | 10.5 |
| slp5 | tre0064719 | 0 | 1 | 0 | 0 | 0 | 0 | 11.0 | 9.9 | 10.0 |
| pep5 | tre0081004 | 0 | 0 | 1 | 0 | 0 | 0 | 8.5 | 8.0 | 11.8 |
| slp8 | tre0058698 | 0 | 1 | 0 | 0 | 1 | 0 | 9.0 | 7.3 | 6.8 |
| pep17 | tre0111818 | 1 | 1 | 0 | 1 | 1 | 0 | 7.6 | 5.5 | 6.5 |
| slp3 | tre0123234 | 0 | 1 | 0 | 0 | 1 | 0 | 6.5 | 4.7 | 5.3 |
| amp6 | tre0081087 | 0 | 0 | 0 | −1 | 1 | 0 | 8.0 | 7.9 | 8.5 |
| amp8 | tre0105279 | 0 | 1 | 0 | 0 | 1 | 0 | 5.3 | 3.6 | 3.4 |
| slp6 | tre0121495 | −1 | 0 | 0 | −1 | 1 | 0 | 6.8 | 4.4 | 4.8 |
| slp9 | tre0060791 | 0 | 0 | 1 | 0 | 0 | 0 | 5.2 | 4.2 | 4.6 |

1 = upregulated and −1 = downregulated.
0 = no change.

### Example 2 Transient siRNA Silencing of Genes

[0216] The five most interesting regulatory genes were downregulated via siRNA based gene silencing treatments and the effect on protease genes was monitored with qPCR. The siRNA transformation was done using protoplasts from the M180 strain. This strain does not have any protease deletions and carries expression constructs for production of MAB01 antibody (MAB01 antibody is described in WO/2013/102674). The siRNAs were complexed with a cationic lipid carrier (GeneSilencer). The mixture was 5 μl of carrier per 0.3 nmoles of siRNA combined in a complexing buffer provided by the kit and incubated for 20 minutes before adding to the protoplasts. After adding the protoplasts to the siRNA/carrier mixture the concentration of each siRNA was 200 pmol/ml. Three separate siRNAs were used together for each gene to ensure a successful knockdown (Table 7).

[0217] The protoplasts (3×106) were added to 200 μl of media (TrMM 4 g/l lactose, 1 g/l yeast extract, 1.2M sorbitol) and then the whole siRNA/lipid carrier mixture was mixed with the protoplasts. These were incubated together at room temperature for 15 minutes before adding 2800 μl of media and adding to a 24 well plate. These were grown in 28° C. on a shaker set for 80 rpm. Each day 1 ml was collected and the mycelium/protoplast mixture was spun down for 5 minutes at 13 k. The culture was sampled for 3 days. The supernatant was removed and the cell pellets were flash frozen and stored at −80° C. The RNA was extracting using the RNeasy mini kit (Qiagen). The total RNA was made into cDNA using the transcriptor high fidelity cDNA synthesis kit (Roche). The cDNA were amplified with qPCR using gene specific primers and gpdl primers for normalization. The qPCR was done with SYBR green I and a Roche lightcycler 480 machine. Primers are listed in Table 8.

TABLE 7
siRNAs targeting regulatory proteins under study.

| siRNA name | siRNA sequence |
|---|---|
| TRIRE3449 | GCCAUUUCGGCUAGCAUCATT |
| TRIRE3449_2 | GUAUUCAUCGGUAUCCUUUTT |
| TRIRE3449_3 | GGAUAAGUCACUUUCUGAATT |
| TRIRE122069 | GUCUGACUCGGACAUUAAGTT |
| TRIRE122069_2 | GCAUGGUGGACUUCUUCUATT |
| TRIRE122069_3 | CUCUCUCACAGAUCAAGUUTT |
| TRIRE105269 | CUCAUGUUGGCUGACGGAATT |
| TRIRE105269_2 | GCAAUCUCGCCGGCUCAAUTT |
| TRIRE105269_3 | GCAAGAUGCUUCCGUCACUTT |
| TRIRE76505 | GGCAAGAAGUUCUCUCGCATT |
| TRIRE76505_2 | CUGUGUAUCUCCAGUCCCATT |
| TRIRE76505_3 | CCCUUUGAGUGCAACGAGUTT |
| TRIRE59740 | GGUGCACGUUGCUGCCAAUTT |
| TRIRE59740_2 | CACGUUGCUGCCAAUUCAUTT |
| TRIRE59740_3 | GGUUGGACGUGGUCAUGUUTT |

TABLE 8
List of qpcr primer sequences

| | Gene | |
|---|---|---|
| | abbrevi- | |
| Primer name | ation | Primer sequence |
| tre122069 fwd | prp1 | CTCAATCGCACGCTATTAGTC |
| qpcr | | |
| tre122069 rev | prp1 | AACTCGCAGTCCTTCATCTC |
| qpcr | | |
| tre3449 fwd qpcr | ptf1 | TTTGATGAACGCCAATACCT |
| tre3449 rev qpcr | ptf1 | GATGTATGACCTGGCTAACC |
| tre105269 fwd | ptf2 | ATGTTGGGTCGTTTGTTCAC |
| qpcr | | |
| tre105269 rev | ptf2 | TGATCCGTATGTCTTGTTCC |
| qpcr | | |
| tre59740 fwd qpcr | ptf3 | ACCTTCTCCAGCAGTTTACC |
| tre59740 rev qpcr | ptf3 | CAGGGTGGGAATATAACGTC |
| tre76505 fwd qpcr | ptf4 | CTGTGTATCTCCAGTCCCAG |
| tre76505 rev qpcr | ptf4 | CAGAAGTCAACATCGTGCTC |
| tre77579 fwd qpcr | pep4 | GAATGCCCAATACTTCTCTG |
| tre77579 rev qpcr | pep4 | GCTACCTGATCCGTAGTG |
| tre122076 fwd | pep8 | TCTGTCCAACCAAAGAGTCC |
| qpcr | | |
| tre122076 rev | pep8 | AAAGGTATCGGAGTCATCAGG |
| qpcr | | |
| tre79807 fwd qpcr | peP9 | TGAAGGAGCTTGAAGAACAC |
| tre79807 rev qpcr | peP9 | CTTTAGGATGGAGAACTGATTGTC |
| tre121306 fwd | pep11 | CAGTACAACCATTCCACCAC |
| qpcr | | |
| tre121306 rev | pep11 | TTGCTGATTGATACGCAGAG |
| qpcr | | |
| tre64719 fwd qpcr | slp5 | GTAACGAGAACCAAGACACTG |
| tre64719 rev qpcr | slp5 | CAGGAGCATAGATGTCAACAC |
| tre22210 fwd qpcr | cpa2 | TAGACGGATTCCTGTATACCC |
| tre22210 rev qpcr | cpa2 | GGGACATTCCACATATAGTTCCA |
| tre22459 fwd qpcr | cpa3 | GAACTCAGTCCTCATCCACC |
| tre22459 rev qpcr | cpa3 | ATGTTGCCGTTGAAGAAGAC |
| tre23475 fwd qpcr | amp3 | AAGACTGGAGGAGTGATTTGG |
| tre23475 rev qpcr | amp3 | GTCTCCCTCAAAGTAGTAGCC |
| gpd1 fwd qpcr | gpd1 | TCCATTCGTGTCCCTACC |
| gpd1 rev qpcr | gpd1 | AGATACCAGCCTCAATGTC |

[0218] We tested siRNA silencing of tre3449, tre122069, tre105269, tre76505, and tre59740. The tre76505 expression was reduced 2.2-fold, tre105269 was reduced 2.4-fold, and tre59740 was reduced by 4.7-fold, tre122069 reduced 1.3-fold, and tre3449 reduced by 1.7-fold. These experiments proved that the silencing siRNAs chosen indeed silence their target gene. The tre59740, tre3449, and tre122069 were investigated in more detail to evaluate if proteases gene expression was affected by silencing these genes.

[0219] The siRNAs treatments were done separately for tre3449 and tre122069 and in combination. When tre3449 siRNAs were transformed into the protoplasts, a clear downregulation of the tre3449 gene (ptf1, protease transcription factor 1) could be seen compared to a lipid carrier only treatment (Table 9). The siRNA treatment was most effective on day 3 where it reduced the expression of ptf1 by 1.7-fold. Likewise the best day for knockdown of tre122069 (prp1, protease regulatory protein 1) was day 3, where the expression of prp1 was reduced 1.3-fold.

[0220] Very interestingly, combined treatment with ptf1 and prp1 siRNAs increased the effectiveness of the knockdown. In the combined treatment, day 2 showed the most effective knockdown of both genes. The ptf1 expression was reduced 4.3-fold and prp1 was reduced 4.1-fold (Table 10). When analysing the single treatments for cross regulation of expression it can be observed that knockdown of ptf1 also effected the expression of prp1. On day 2, ptf1 siRNA resulted in 1.8-fold downregulation of prp1 and significant reduction on day 1 and 3, as well. The effect of prp1 siRNA treatment was less pronounced and it resulted in a small 1.4-fold change in the ptf1 expression on day 3 only (Table 10). The ptf1 may be involved in regulating prp1 and could possibly use prp1 as a binding partner.

[0221] The goal of these knock down studies was to determine whether reduction in the expression of ptf1 and/or prp1 would affect protease gene expression. In this experiment, the pep11 protease (tre121306) was used as a representative protease to monitor its expression as a result of the siRNA treatments on all days of the experiment. The pep11 protease gene sits right next to ptf1 on the chromosome and was found to co-regulate with ptf1 in the protease induction experiments.

[0222] When ptf1 was knocked down by siRNA the expression of pep11 was reduced 1.3- and 1.5-fold on day 1 and 2 (Table 11). The knockdown of prp1 did not affect the expression of pep11 until day 3. However, the knockdown effect of prp1 on itself was not seen until day 3. On day 3 the prp1 siRNA treatment reduced pep11 expression 1.4-fold. However, the combined treatment with both ptf1 and prp1 siRNAs boosted the ability to down regulate pep11 up to 3-fold on day 2. The two regulator proteins appear to be involved together in the ability to reduce protease expression.

[0223] The effect of silencing ptf1 and ptf1/prp1 on protease expression was expanded to a larger set of protease genes. These were protease genes that were not already deleted in the strain. The day 1 samples were analyzed in a different qPCR run to see how pep4, pep8, pep9, pep11, slp5, cpa2, cpa3, and amp3 protease were affected after knockdown. The treatment with ptf1 siRNA did not affect the expression of pep4 or slp5, but all of the other proteases were expressed less after treatment. The combination of ptf1/prp1 siRNAs increased the magnitude of the effect, but did not affect the overall result (Table 11). These proteases were also chosen because they appeared to be co-regulated in some way with ptf1 and prp1. The aspartic proteases pep8, pep9, and pep11 could be membrane associated proteases, while the pep4 protease appears to be partly secreted. This limited set of data could suggest that there may be some regulation of membrane bound aspartic proteases. The same set of proteases were investigated and it was found that tre59740 (ptf3) reduced the expression of pep11 by 2.3-fold, slp5 by 1.9-fold, and cpa3 by 4.5-fold.

TABLE 9
qPCR analysis of the expression changes after combined treatment with
tre3449 and tre122069 siRNAs compared to the control. The combined
treatment resulted in a more potent downregulation, with the peak
effectiveness being on day 2.
FOLD knockdown of mRNA expression

| | tre3449 | tre122069 | | |
|---|---|---|---|---|
| | treatment | treatment | | combined treatment |
| | tre3449 | tre122069 | combined treatment | tre122069 |
| | expression | expression | tre3449 expression | expression |
| day 1 | 1.5 | 1.0 | 2.4 | 3.3 |
| day 2 | 1.7 | 1.0 | 4.3 | 4.1 |
| day 3 | 1.7 | 1.3 | 1.8 | 2.4 |

TABLE 10
qPCR analysis of the expression changes after treatment with tre3449
or tre122069 siRNA compared to the control. Treatment with tre3449
siRNA affects tre122069 expression and vice versa suggesting
some form on cross regulation.
FOLD knockdown of mRNA expression

| | tre3449 treatment | tre122069 treatment |
|---|---|---|
| | tre122069 expression | tre3449 expression |
| day 1 | 1.5 | 1.0 |
| day 2 | 1.8 | 0.9 |
| day 3 | 1.7 | 1.4 |

TABLE 11
qPCR analysis of the expression changes after treatment with tre3449,
tre122069, and tre3449/tre122069 siRNA compared to the control. All
these treatments downregulated pep11 expression, but the most potent
reduction in expression was observed with the combined treatment.
FOLD knockdown of mRNA expression

| | tre3449 treatment | | |
|---|---|---|---|
| | tre121306 | tre122069 treatment | combined treatment |
| | expression | tre121306 expression | tre121306 expression |
| day 1 | 1.3 | 1.2 | 2.2 |
| day 2 | 1.5 | 1.0 | 3.1 |
| day 3 | 1.3 | 1.4 | 1.4 |

TABLE 12
qPCR analysis of the expression changes after treatment with tre3449,
tre3449/tre122069, or tre59740 siRNA compared to the control.
These tre3449/tre122069 treatments downregulated the expression
of pep8, pep9, pep11, cpa2, cpa3, and amp3, but not pep4 and slp5.
The combined treatment was more effective at reducing the protease
expression.
The tre59740 siRNA affected pep11, slp5, and cpa3.

| | tre3449 siRNA | tre3449/122069 | tre59740 siRNA |
|---|---|---|---|
| | treatment | siRNA treatment | treatment |
| expression: | fold knockdown | fold knockdown | fold knockdown |
| tre3449 | 1.5 | 2.4 | 1.0 |
| tre122069 | 1.5 | 2.4 | 1.0 |
| pep4 | 1.2 | 1.0 | 1.0 |
| pep8 | 1.4 | 2.4 | 1.0 |
| pep9 | 2.0 | 2.5 | 1.0 |
| pep11 | 1.5 | 2.7 | 2.3 |
| slp5 | 1.0 | 1.1 | 1.9 |
| cpa2 | 1.8 | 3.3 | 1.0 |
| cpa3 | 1.4 | 2.8 | 4.5 |
| amp3 | 1.6 | 3.0 | 1.0 |

### Example 3. Creation of Interferon Expression Strains with Regulatory Protein Deletions

[0224] The Trichoderma reesei interferon production strain M577 was used to investigate how deletion of protease regulators affected interferon expression and protease activity. The M577 strain was generated as described in WO/2013/102674. The pyr4-version of M577, M788, was described in WO/2015/004241.

### Generation of Prp1 Deletion Plasmid

[0225] The deletion plasmid pTTv273 for the transcription factor prp1 (tre122069) was constructed essentially as described for pep1 deletion plasmid pTTv41 in WO/2013/102674, except that the marker used for selection was pyr4-hgh from pTTv194.

939 bp of 5′ flanking region and 943 bp of 3′ flanking region were selected as the basis of the prp1 deletion plasmid pTTv273. These fragments were amplified by PCR using the primers listed in Table 13. Template used in the PCR of the flanking regions was from the T. reesei wild type strain QM6a. The products were separated with agarose gel electrophoresis and the correct fragments were isolated from the gel with a gel extraction kit (Qiagen) using standard laboratory methods. The pyr4-hgh cassette was obtained from pTTv194 (Apep4-pyr-hgh) with NotI digestion. To enable removal of the marker cassette, NotI restriction sites were introduced on both sides of the cassette. Vector backbone was EcoRI/XhoI digested pRS426 as in WO/2013/102674. The plasmid pTTv273 was constructed with the 5′ flank, 3′ flank, pyr4-hgh marker, and vector backbone using the yeast homologous recombination method described in WO/2013/102674. This deletion plasmid for prp1 (pTTv273, Table 13) results in a deletion in the prp1 locus and covers the complete coding sequence of PRP1.

TABLE 13
Primers for generating prp1 deletion plasmids.
Deletion plasmid pTTv273 (Δprp1-pyr4-hgh), vector
backbone pRS426

| Primer | Sequence |
|---|---|
| T1035_122069_ | GTAACGCCAGGGTTTTCCCAGTCACGACGGTTT |
| 5flkfw_vector | AAACATGGGGATTGGAGAGTGATG |
| T1036_122069_ | GCGCTGGCAACGAGAGCAGAGCAGCAGTAGTCG |
| 5flkrev_pyr4Prom | ATGCTAGGCGGCCGCGAAGCAACCGAGGTGAAA |
| | AG |
| T1037_122069_ | CAACCAGCCGCAGCCTCAGCCTCTCTCAGCCTC |
| 3flkfw_pyr4loop | ATCAGCCGCGGCCGCACGATGCAGGTTTGGTTT |
| | TC |
| T1038_122069_ | GCGGATAACAATTTCACACAGGAAACAGCGTTT |
| 3flkrev_vector | AAACCACCGGAATTGTCTGACCTT |

### Generation of Prp1 Deletion Strain

[0226] To isolate the deletion cassette, plasmid pTTv273 was digested with Pinel and the correct fragment purified from an agarose gel using a QIAquick Gel Extraction Kit (Qiagen). Approximately 5 μg of the deletion cassette was used to transform the M577 strain. Preparation of protoplasts and transformation were carried out essentially as described in WO/2013/102674 using hygromycin selection.

[0227] Transformants were picked as first streaks. Growing streaks were screened by PCR (using the primers listed in Table 14) for correct integration. Clones giving the expected signals were purified to single cell clones and rescreened by PCR using the primers listed in Table 12. The final selected strain was called M675 (M577 with Δprp1).

TABLE 14
Primers for screening prp1 integration and strain
purity.
For screening integration of pTTv273

| Primer | Sequence |
|---|---|
| T1039_122069_screen_5flk_fwd | CACCAACTGGCAAGTCTCAA |
| T1014_screen_5flk_pyr_rev | GGAGAATTTCGTGCGATCC |
| T1015_screen_3flk_hygro_fwd | GCATGGTTGCCTAGTGAATG |
| T1040_122069_screen_3flk_rev | TGATCTCGCGAAGAACCTTT |

For screening deletion of prp1 ORF

| Primer | Sequence |
|---|---|
| T1041_122069_orf_fwd | GCCTCGGGGAGATATGAGAT |
| T1042_122069_orf_rev | AAAATTCCAAGGCGACACAC |

Generation of ptf1 Deletion Plasmid

[0228] The deletion plasmid pTTv372 for the transcription factor ptf1 (tre3449) was constructed essentially as described for pep1 deletion plasmid pTTv41 in WO/2013/102674, except that the marker used for selection was pyr4-hgh from pTTv194.

[0229] 940 bp of 5′ flanking region and 963 bp of 3′ flanking region were selected as the basis of the ptf1 deletion plasmid pTTv372. These fragments were amplified by PCR using the primers listed in Table 13. Template used in the PCR of the flanking regions was from the T. reesei wild type strain QM6a. The products were separated with agarose gel electrophoresis and the correct fragments were isolated from the gel with a gel extraction kit (Qiagen) using standard laboratory methods. The pyr4-hgh cassette was obtained from pTTv194 (Apep4-pyr-hgh) with NotI digestion. To enable removal of the marker cassette, NotI restriction sites were introduced on both sides of the cassette. Vector backbone was EcoRI/XhoI digested pRS426 as in WO/2013/102674. The plasmid pTTv372 was constructed with the 5′ flank, 3′ flank, pyr4-hgh marker, and vector backbone using the yeast homologous recombination method described in WO/2013/102674. This deletion plasmid for ptf1 (pTTv372, Table 15) results in a deletion in the ptf1 locus and covers the complete coding sequence of PTF1.

TABLE 15
Primers for generating ptf1 deletion plasmids.
Deletion plasmid pTTv372 (Δptf1-pyr4-hgh), vector
backbone pRS426

| Primer | Sequence |
|---|---|
| T1043_3449_ | GTAACGCCAGGGTTTTCCCAGTCACGACGGTTT |
| 5flkfw_vector | AAACCGGAGCTGGGTAGAAGTGTC |
| T1044_3449_ | GCGCTGGCAACGAGAGCAGAGCAGCAGTAGTCG |
| 5flkrev_pyr4Prom | ATGCTAGGCGGCCGCTGATGGAAGAGAGGGTTG |
| | AGA |
| T1308_3449_ | CAACCAGCCGCAGCCTCAGCCTCTCTCAGCCTC |
| 3flkfw_pyr4loop | ATCAGCCGCGGCCGCCAATCCCGAGACTCAACT |
| | CC |
| T1309_3449_ | GCGGATAACAATTTCACACAGGAAACAGCGTTT |
| 3flkrev_vector | AAACTCAGAACATGATCCACTCGAC |

Generation of ptf1 Deletion Strains

[0230] To isolate the deletion cassette, plasmid pTTv372 was digested with Pinel and the correct fragment purified from an agarose gel using a QIAquick Gel Extraction Kit (Qiagen). Approximately 5 μg of the pTTv372 deletion cassette was used to transform the M788 pyr4-strain and the M755 pyr4-strain of M675 (prp1 deletion). Preparation of protoplasts and transformation were carried out essentially as described in WO/2013/102674 using hygromycin selection.

[0231] Transformants were picked as first streaks. Growing streaks were screened by PCR (using the primers listed in Table 16) for correct integration. Clones giving the expected signals were purified to single cell clones and rescreened by PCR using the primers listed in Table 14. The final selected strains were called M845 (ptf1 deletion) and M843 (prp1/ptf1 deletion). The M843 strain underwent 5FOA plating to remove the pyr4/hygromycin marker and the resulting strain was named M1070.

TABLE 16
Primers for screening ptf1 integration and strain
purity.
For screening integration of pTTv372

| Primer | Sequence |
|---|---|
| T1047_3449_screen_5flk_fwd | AGTTCCCTGATGTGGACCTG |
| T1014_screen_5flk_pyr_rev | GGAGAATTTCGTGCGATCC |
| T1015_screen_3flk_hygro_fwd | GCATGGTTGCCTAGTGAATG |
| T1310_3449_screen_3flk_rev | TTTCATTGCCGCTCATCATA |

For screening deletion of ptf1 ORF

| Primer | Sequence |
|---|---|
| T1049_3449_orf_fwd | CTTATGGCGGAGAAGCTGAC |
| T1050_3449_orf_rev | GGTTTGCTAGCCGTTCAGAG |

Generation of ptf2 Deletion Plasmid

[0232] The deletion plasmid pTTv373 for the transcription factor ptJ2 (tre105269) was constructed essentially as described for pep1 deletion plasmid pTTv41 in WO/2013/102674, except that the marker used for selection was pyr4-hgh from pTTv194.

[0233] 1042 bp of 5′ flanking region and 873 bp of 3′ flanking region were selected as the basis of the ptf2 deletion plasmid pTTv373. These fragments were amplified by PCR using the primers listed in Table 15. Template used in the PCR of the flanking regions was from the T. reesei wild type strain QM6a. The products were separated with agarose gel electrophoresis and the correct fragments were isolated from the gel with a gel extraction kit (Qiagen) using standard laboratory methods. The pyr4-hgh cassette was obtained from pTTv194 (Δpep4-pyr-hgh) with NotI digestion. To enable removal of the marker cassette, NotI restriction sites were introduced on both sides of the cassette. Vector backbone was EcoRI/XhoI digested pRS426 as in WO/2013/102674. The plasmid pTTv373 was constructed with the 5′ flank, 3′ flank, pyr4-hgh marker, and vector backbone using the yeast homologous recombination method described in WO/2013/102674. This deletion plasmid for ptf2 (pTTv372, Table 17) results in a deletion in the ptf2 locus and covers the complete coding sequence of PTF2.

TABLE 17
Primers for generating ptf2 deletion plasmids.
Deletion plasmid pTTv373 (Δptf1-pyr4-hgh), vector
backbone pRS426

| Primer | Sequence |
|---|---|
| T1311_105269_ | GTAACGCCAGGGTTTTCCCAGTCACGACGGTTT |
| 5flkfw_vector | AAACTAATTGACCCGGACAAGGAG |
| T1312_105269_ | GCGCTGGCAACGAGAGCAGAGCAGCAGTAGTCG |
| 5flkrev_pyr4Prom | ATGCTAGGCGGCCGCGAAGAACATGGGGAAGCA |
| | AA |
| T1313_105269_ | CAACCAGCCGCAGCCTCAGCCTCTCTCAGCCTC |
| 3flkfw_pyr4loop | ATCAGCCGCGGCCGCCCATTTCCTTTGGTTTGT |
| | GG |
| T1314_105269_ | GCGGATAACAATTTCACACAGGAAACAGCGTTT |
| 3flkrev_vector | AAACACATGGTCAATCCCCACAGT |

Generation of ptf2 Deletion Strain

[0234] To isolate the deletion cassette, plasmid pTTv373 was digested with Pinel and the correct fragment purified from an agarose gel using a QIAquick Gel Extraction Kit (Qiagen). Approximately 5 μg of the deletion cassette was used to transform the M788 pyr4-strain. Preparation of protoplasts and transformation were carried out essentially as described in WO/2013/102674 using hygromycin selection.

[0235] Transformants were picked as first streaks. Growing streaks were screened by PCR (using the primers listed in Table 18) for correct integration. Clones giving the expected signals were purified to single cell clones and rescreened by PCR using the primers listed in Table 16. The final strain was named M847.

TABLE 18
Primers for screening ptf2 integration and strain purity.
For screening integration of pTTv373

| Primer | Sequence |
|---|---|
| T1315_105269_screen_5flk_fwd | CTCACATTGCCTCGAACAGA |
| T1084_screen_5flk_pyr_rev | TCTTGAGCACGACAATCGAC |
| T1015_screen_3flk_hygro_fwd | GCATGGTTGCCTAGTGAATG |
| T1316_59740_screen_3flk_rev | ATCGTTGCACATCAGGTGAG |

For screening deletion of ptf2 ORF

| Primer | Sequence |
|---|---|
| T1317_105269_orf_fwd | AGTCCTACAGGGTGGCATTG |
| T1318_105269_orf_rev | TCGACATCGAGCATCAACTC |

Generation of ptf3 Deletion Plasmid

[0236] The deletion plasmid pTTv374 for the transcription factor ptf3 (tre59740) was constructed essentially as described for pep1 deletion plasmid pTTv41 in WO/2013/102674, except that the marker used for selection was pyr4-hgh from pTTv194.

[0237] 994 bp of 5′ flanking region and 912 bp of 3′ flanking region were selected as the basis of the ptf3 deletion plasmid pTTv374. These fragments were amplified by PCR using the primers listed in Table 17. Template used in the PCR of the flanking regions was from the T. reesei wild type strain QM6a. The products were separated with agarose gel electrophoresis and the correct fragments were isolated from the gel with a gel extraction kit (Qiagen) using standard laboratory methods. The pyr4-hgh cassette was obtained from pTTv194 (Δpep4-pyr-hgh) with NotI digestion. To enable removal of the marker cassette, NotI restriction sites were introduced on both sides of the cassette. Vector backbone was EcoRI/XhoI digested pRS426 as in Example 1. The plasmid pTTv374 was constructed with the 5′ flank, 3′ flank, pyr4-hgh marker, and vector backbone using the yeast homologous recombination method described in WO/2013/102674. This deletion plasmid for ptf3 (pTTv374, Table 19) results in a deletion in the ptf3 locus and covers the complete coding sequence of PTF3.

TABLE 19
Primers for generating ptf3 deletion plasmids.
Deletion plasmid pTTv374 (Δptf3-pyr4-hgh), vector backbone pRS426

| Primer | Sequence |
|---|---|
| T1319_59740_5flkfw_vector | GTAACGCCAGGGTTTTCCCAGTCACGACGGTTTAAACCTCGAA |
| | AGCAGCCAACAAAT |
| T1320_59740_5flkrev_pyr4Prom | GCGCTGGCAACGAGAGCAGAGCAGCAGTAGTCGATGCTAGGC |
| | GGCCGCCGCTGGGCTTGATTAACATT |
| T1321_59740_3flkfw_pyr4loop | CAACCAGCCGCAGCCTCAGCCTCTCTCAGCCTCATCAGCCGCG |
| | GCCGCTGCTGCCAATTCATTTACCA |
| T1322_59740_3flkrev_vector | GCGGATAACAATTTCACACAGGAAACAGCGTTTAAACTTCCAG |
| | ATCCTCCTTTATAGCC |

Generation of ptf3 Deletion Strain

[0238] To isolate the deletion cassette, plasmid pTTv374 was digested with Pinel and the correct fragment purified from an agarose gel using a QIAquick Gel Extraction Kit (Qiagen). Approximately 5 μg of the deletion cassette was used to transform the M788 pyr4-strain. Preparation of protoplasts and transformation were carried out essentially as described in WO/2013/102674 using hygromycin selection.

[0239] Transformants were picked as first streaks. Growing streaks were screened by PCR (using the primers listed in Table 20) for correct integration. Clones giving the expected signals were purified to single cell clones and rescreened by PCR using the primers listed in Table 18. The final strain was named M958.

TABLE 20
Primers for screening ptf3 integration and strain purity.
For screening integration of pTTv374

| Primer | Sequence |
|---|---|
| T1323_59740_screen_5flk_fwd | CACCGCACGCTTCATACTTA |
| T1084_screen_5flk_pyr_rev | TCTTGAGCACGACAATCGAC |
| T1015_screen_3flk_hygro_fwd | GCATGGTTGCCTAGTGAATG |
| T1324_59740_screen_3flk_rev | AGCTAGAGGAGCGAGGGAAG |

For screening deletion of ptf3 ORF

| Primer | Sequence |
|---|---|
| T1325_59740_orf_fwd | AGCAAGTCACCTGGTTGGAC |
| T1326_59740_orf_rev | GAACGCGGTAGGTGATTGAT |

Generation of ptf4 Deletion Plasmid

[0240] The deletion plasmid pTTv461 for the transcription factor ptf4 (tre76505) was constructed essentially as described for pep1 deletion plasmid pTTv41 WO/2013/102674, except that the marker used for selection was pyr4-hgh from pTTv194.

[0241] 1100 bp of 5′ flanking region and 1355 bp of 3′ flanking region were selected as the basis of the ptf4 deletion plasmid pTTv461. These fragments were amplified by PCR using the primers listed in Table 19. Template used in the PCR of the flanking regions was from the T. reesei wild type strain QM6a. The products were separated with agarose gel electrophoresis and the correct fragments were isolated from the gel with a gel extraction kit (Qiagen) using standard laboratory methods. The pyr4-hgh cassette was obtained from pTTv194 (Δpep4-pyr-hgh) with NotI digestion. To enable removal of the marker cassette, NotI restriction sites were introduced on both sides of the cassette. Vector backbone was EcoRI/XhoI digested pRS426 as in WO/2013/102674. The plasmid pTTv461 was constructed with the 5′ flank, 3′ flank, pyr4-hgh marker, and vector backbone using the yeast homologous recombination method described in WO/2013/102674. This deletion plasmid for ptf4 (pTTv461, Table 21) results in a deletion in the ptf4 locus and covers the complete coding sequence of PTF4.

TABLE 21
Primers for generating ptf4 deletion plasmids.
Deletion plasmid pTTv461 (Δptf4-pyr4-hgh), vector backbone pRS426

| Primer | Sequence |
|---|---|
| T1712_76505_5flkfw_vect | GTAACGCCAGGGTTTTCCCAGTCACGACGGTTTAAACGAGCAT |
| | TCGCTAGTGGGAAG |
| T1713_76505_5flkrev_pyr4Prom | GCGCTGGCAACGAGAGCAGAGCAGCAGTAGTCGATGCTAGGC |
| | GGCCGCTGGTAAGGGTGATGGAGGAG |
| T1714_76505_3flkfw_pyr4loop | CAACCAGCCGCAGCCTCAGCCTCTCTCAGCCTCATCAGCCGCG |
| | GCCGCCTCTCATACGCCTGACACGA |
| T1715_76505_3flkrev_vect | GCGGATAACAATTTCACACAGGAAACAGCGTTTAAACCGTTCT |
| | TTCCACCCAAGGTA |

Generation of ptf4 Deletion Strain

[0242] To isolate the deletion cassette, plasmid pTTv461 was digested with Pinel and the correct fragment purified from an agarose gel using a QIAquick Gel Extraction Kit (Qiagen). Approximately 5 μg of the deletion cassette was used to transform the M1070 pyr4-strain (with prp1/ptf1 deletions). Preparation of protoplasts and transformation were carried out essentially as described in WO/2013/102674 using hygromycin selection.

[0243] Transformants were picked as first streaks. Growing streaks were screened by PCR (using the primers listed in Table 22) for correct integration. Clones giving the expected signals were purified to single cell clones and rescreened by PCR using the primers listed in Table 22.

TABLE 22
Primers for screening ptf4 integration and strain purity.
For screening integration of pTTv461

| Primer | Sequence |
|---|---|
| T1716_76505_screen_5flkfw | TCTGGCTCTGACGTTGATTG |
| T1084_screen_5flk_pyr_rev | TCTTGAGCACGACAATCGAC |
| T1015_screen_3flk_hygro_fwd | GCATGGTTGCCTAGTGAATG |
| T1717_76505_screen_3flkrev | TCAAGCCTGTCAAACCGAAT |

For screening deletion of ptf4 ORF

| Primer | Sequence |
|---|---|
| T1718_76505_orf_fw | GACAGAAGAAGGACCGCAAG |
| T1719_76505_orf_rev | ATCTCTGAGGCGATCTGGAA |

Generation of ptf7 Deletion Plasmid

[0244] The deletion plasmid pTTv462 for the transcription factor ptf7 (tre106259) was constructed essentially as described for pep1 deletion plasmid pTTv41 in WO/2013/102674, except that the marker used for selection was pyr4-hgh from pTTv194.

[0245] 971 bp of 5′ flanking region and 985 bp of 3′ flanking region were selected as the basis of the ptf7 deletion plasmid pTTv462. These fragments were amplified by PCR using the primers listed in Table 23. Template used in the PCR of the flanking regions was from the T. reesei wild type strain QM6a. The products were separated with agarose gel electrophoresis and the correct fragments were isolated from the gel with a gel extraction kit (Qiagen) using standard laboratory methods. The pyr4-hgh cassette was obtained from pTTv194 (Δpep4-pyr-hgh) with NotI digestion. To enable removal of the marker cassette, NotI restriction sites were introduced on both sides of the cassette. Vector backbone was EcoRI/XhoI digested pRS426 as in WO/2013/102674. The plasmid pTTv462 was constructed with the 5′ flank, 3′ flank, pyr4-hgh marker, and vector backbone using the yeast homologous recombination method described in WO/2013/102674. This deletion plasmid for ptf7 (pTTv462, Table 23) results in a deletion in the ptf7 locus and covers the complete coding sequence of PTF7.

Table 23. Primers for Generating ptf7 Deletion Plasmids.

Deletion plasmid pTTv462 (Δptf7-pyr4-hgh), vector backbone pRS426

| Primer | Sequence |
|---|---|
| T1704_106259_5flkfw_vect | GTAACGCCAGGGTTTTCCCAGTCACGACGGTTTAAACGGGCAA |
| | GGAGTTTCTTAGGG |
| T1705_106259_5flkrev_pyr4Prom | GCGCTGGCAACGAGAGCAGAGCAGCAGTAGTCGATGCTAGGC |
| | GGCCGCACATCGCATCTGACCTTCCT |
| T1706_106259_3flkfw_pyr4loop | CAACCAGCCGCAGCCTCAGCCTCTCTCAGCCTCATCAGCCGCG |
| | GCCGCTATCATGGCAGCTGATGCTC |
| T1707_106259_3flkrev_vect | GCGGATAACAATTTCACACAGGAAACAGCGTTTAAACGCGGTT |
| | TTCGTCTGTCTAGG |

Generation of ptf7 Deletion Strain

[0246] To isolate the deletion cassette, plasmid pTTv462 was digested with Pinel and the correct fragment purified from an agarose gel using a QIAquick Gel Extraction Kit (Qiagen). Approximately 5 μg of the deletion cassette was used to transform the M1070 pyr4-strain (with prp1/ptf1 deletions). Preparation of protoplasts and transformation were carried out essentially as described in WO/2013/102674 using hygromycin selection.

[0247] Transformants were picked as first streaks. Growing streaks were screened by PCR (using the primers listed in Table 24) for correct integration. Clones giving the expected signals were purified to single cell clones and rescreened by PCR using the primers listed in Table 22.

TABLE 24
Primers for screening ptf7 integration and strain purity.
For screening integration of pTTv462

| Primer | Sequence |
|---|---|
| T1708_106259_screen_5flk | ACAGCCACGAGACCTTTGAG |
| T1084_screen_5flk_pyr_rev | TCTTGAGCACGACAATCGAC |
| T1015_screen_3flk_hygro_fwd | GCATGGTTGCCTAGTGAATG |
| T1709_106259_screen_3flkrev | CATATCGCCCACTTCGTACA |

For screening deletion of ptf7 ORF

| Primer | Sequence |
|---|---|
| T1710_106259_orf_fw | AGACGTACATGCAGCACTCG |
| T1711_106259_orf_rev | CAGTCCCTCTCCCGGATACT |

Generation of ptf8 Deletion Plasmid

[0248] The deletion plasmid pTTv463 for the transcription factor ptf8 (tre106706) was constructed essentially as described for pep1 deletion plasmid pTTv41 in WO/2013/102674, except that the marker used for selection was pyr4-hgh from pTTv194.

[0249] 999 bp of 5′ flanking region and 1038 bp of 3′ flanking region were selected as the basis of the ptf8 deletion plasmid pTTv463. These fragments were amplified by PCR using the primers listed in Table 25. Template used in the PCR of the flanking regions was from the T. reesei wild type strain QM6a. The products were separated with agarose gel electrophoresis and the correct fragments were isolated from the gel with a gel extraction kit (Qiagen) using standard laboratory methods. The pyr4-hgh cassette was obtained from pTTv194 (Δpep4-pyr-hgh) with NotI digestion. To enable removal of the marker cassette, NotI restriction sites were introduced on both sides of the cassette. Vector backbone was EcoRI/XhoI digested pRS426 as in WO/2013/102674. The plasmid pTTv463 was constructed with the 5′ flank, 3′ flank, pyr4-hgh marker, and vector backbone using the yeast homologous recombination method described in WO/2013/102674. This deletion plasmid for ptf8 (pTTv463, Table 25) results in a deletion in the ptf8 locus and covers the complete coding sequence of PTF8.

TABLE 25
Primers for generating Mg deletion plasmids.
Deletion plasmid pTTv463 (Δptf8-pyr4-hgh), vector backbone pRS426

| Primer | Sequence |
|---|---|
| T1696_106706_5flkfw_vect | GTAACGCCAGGGTTTTCCCAGTCACGACGGTTTAAACAAGAAG |
| | GCGCAAAGACGTTA |
| T1697_106706_5flkrev_pyr4Prom | GCGCTGGCAACGAGAGCAGAGCAGCAGTAGTCGATGCTAGGC |
| | GGCCGCTAGAAGAAAATCGGGCATCG |
| T1698_106706_3flkfw_pyr4loop | CAACCAGCCGCAGCCTCAGCCTCTCTCAGCCTCATCAGCCGCG |
| | GCCGCGGACGCCTTCTGTCCATAAA |
| T1699_106706_3flkrev_vect | GCGGATAACAATTTCACACAGGAAACAGCGTTTAAACAATTTC |
| | CCGCTGGTTTCTCT |

Generation of ptf8 Deletion Strain

[0250] To isolate the deletion cassette, plasmid pTTv463 was digested with Pinel and the correct fragment purified from an agarose gel using a QIAquick Gel Extraction Kit (Qiagen). Approximately 5 μg of the deletion cassette was used to transform the M1070 pyr4-strain (with prp1/ptf1 deletions). Preparation of protoplasts and transformation were carried out essentially as described in WO/2013/102674 using hygromycin selection.

[0251] Transformants were picked as first streaks. Growing streaks were screened by PCR (using the primers listed in Table 26) for correct integration. Clones giving the expected signals were purified to single cell clones and rescreened by PCR using the primers listed in Table 24.

TABLE 26
Primers for screening ptf8 integration and strain purity.
For screening integration of pTTv463

| Primer | Sequence |
|---|---|
| T1700_106706_screen_5flkfw | GTTTCTTGGAGACCCGTCAT |
| T1084_screen_5flk_pyr_rev | TCTTGAGCACGACAATCGAC |
| T1015_screen_3flk_hygro_fwd | GCATGGTTGCCTAGTGAATG |
| T1701_106706_screen_3flkrev | TGTCCAAGGTCGATGTCAAG |

For screening deletion of ptf8 ORF

| Primer | Sequence |
|---|---|
| T1702_106706_orf_fw | TGCGACTTTCGACATGAGTC |
| T1703_106706_orf_rev | GAAACTCAGACGCGTTAGGC |

Generation of ptf9 Deletion Plasmid

[0252] The deletion plasmid pTTv464 for the transcription factor ptf9 (tre108940) was constructed essentially as described for pep1 deletion plasmid pTTv41 in WO/2013/102674, except that the marker used for selection was pyr4-hgh from pTTv194.

[0253] 1034 bp of 5′ flanking region and 1000 bp of 3′ flanking region were selected as the basis of the ptf9 deletion plasmid pTTv464. These fragments were amplified by PCR using the primers listed in Table 27. Template used in the PCR of the flanking regions was from the T. reesei wild type strain QM6a. The products were separated with agarose gel electrophoresis and the correct fragments were isolated from the gel with a gel extraction kit (Qiagen) using standard laboratory methods. The pyr4-hgh cassette was obtained from pTTv194 (Δpep4-pyr-hgh) with NotI digestion. To enable removal of the marker cassette, NotI restriction sites were introduced on both sides of the cassette. Vector backbone was EcoRI/XhoI digested pRS426 as in WO/2013/102674. The plasmid pTTv464 was constructed with the 5′ flank, 3′ flank, pyr4-hgh marker, and vector backbone using the yeast homologous recombination method described in WO/2013/102674. This deletion plasmid for ptf9 (pTTv464, Table 27) results in a deletion in the ptf9 locus and covers the complete coding sequence of PTF9.

TABLE 27
Primers for generating p09 deletion plasmids.
Deletion plasmid pTTv464 (Δptf9-pyr4-hgh), vector backbone pRS426

| Primer | Sequence |
|---|---|
| T1688_108940_5flkfw_vect | GTAACGCCAGGGTTTTCCCAGTCACGACGGTTTAAACAGCTGG |
| | AGACGCAATACCTG |
| T1689_108940_5flkrev_pyr4Prom | GCGCTGGCAACGAGAGCAGAGCAGCAGTAGTCGATGCTAGGC |
| | GGCCGCAGCATTCGCTCCGTGTAAGT |
| T1690_108940_3flkfw_pyr4loop | CAACCAGCCGCAGCCTCAGCCTCTCTCAGCCTCATCAGCCGCG |
| | GCCGCTTCTGTTTCCTCACGGCTCT |
| T1691_108940_3flkrev_vect | GCGGATAACAATTTCACACAGGAAACAGCGTTTAAACTACACC |
| | CCACACGAGAACAA |

Generation of ptf9 Deletion Strain

[0254] To isolate the deletion cassette, plasmid pTTv464 was digested with Pinel and the correct fragment purified from an agarose gel using a QIAquick Gel Extraction Kit (Qiagen). Approximately 5 μg of the deletion cassette was used to transform the M1070 pyr4-strain (with prp1/ptf1 deletions). Preparation of protoplasts and transformation were carried out essentially as described in WO/2013/102674 using hygromycin selection.

[0255] Transformants were picked as first streaks. Growing streaks were screened by PCR (using the primers listed in Table 28) for correct integration. Clones giving the expected signals were purified to single cell clones and rescreened by PCR using the primers listed in Table 26.

TABLE 28
Primers for screening ptf9 integration and strain purity.
For screening integration of pTTv464

| Primer | Sequence |
|---|---|
| T1692_108940_screen_5flkfw | CAAGGAGCCCAGCGTAATAG |
| T1084_screen_5flk_pyr_rev | TCTTGAGCACGACAATCGAC |
| T1015_screen_3flk_hygro_fwd | GCATGGTTGCCTAGTGAATG |
| T1693_108940_screen_3flkrev | CACCACGCTCATTCTCTTTG |

For screening deletion of ptf9 ORF

| Primer | Sequence |
|---|---|
| T1694_108940_orf_fw | CATTCGCCTCAAGCTTCACT |
| T1695_108940_orf_rev | GAGATCGGCCAGATCCTGT |

### Example 4. Cultivation of Single and Double Deletion Strains

[0256] Several regulatory proteins were identified that are likely involved in protease gene regulation. We created deletion strains for the prp1 (tre122069)/M675, ptf1 (tre3449)/M845, ptf2 (tre59740)/M847, ptf3 (tre59740)/M958, and the prp1/ptf1 double deletion strain M843 in the M577 interferon production strain. The prp1 deletion strain M675 the double deletion strain M843.

[0257] These strains and their parental strain M577 were cultivated in 24 well cultures and in the fermentor. In 24 well culture the strains were grown in TrMM plus 20 g/L spent grain extract and 40 g/L lactose, and 100 mM PIPPS at pH 4.5. The interferon production levels were measured via immunoblotting the 24 well culture supernatants diluted so that 0.2 μl was loaded per well in a 4-20% PAGE gel. The interferon was detected with anti-IFN antibody (Abeam #ab9386) diluted 1 μg/ml in TBST. The secondary was goat anti-mouse IRdye 680 conjugated antibody (Li-Cor #926-68070) diluted 1:30,000 in TBST. Detection was done by near infrared fluorescence (700 nm) using a Li-Cor Odyssey CLX imager. In these studies, the prp1/ptf1 deletion strains M843 produced more full length and carrier bound interferon than M577. Also, M675 was improved over the control on day 7 of the culture.

[0258] The M675 strain was cultivated in fermentor compared to its parental strain M577. The cultivation was done in TrMM plus 40 g/l lactose, 20 g/l spent grain extract, and 20 g/l whole spent grain at pH 4.5 with the temperature shifting from 28° to 22° at 48 h and grown for 5 days. The interferon concentration as determined by immunoblotting. The fermentor supernatants were diluted so that 0.1 μl was loaded into each well into a 4-20% PAGE gel Immunblotting was done to calculate the concentration compared to an interferon standard curve ranging from 400 to 25 ng. The interferon was detected with anti-IFN antibody (Abcam #ab9386) diluted 1 μg/ml in TBST. The secondary was goat anti-mouse IRdye 680 conjugated antibody (Li-Cor #926-68070) diluted 1:30,000 in TBST. Detection was done by near infrared fluorescence (700 nm) using a Li-Cor Odyssey CLX imager. Under these conditions the M675 strain could produce a maximum of 0.835 g/l on day 2 and 0.585 g/l on day 3. The maximum level produced by the M577 control was 500 mg/l. Thus the deletion of the regulatory protein resulted in a small improvement in interferon production.

[0259] The same strains were cultivated again with different media conditions. The cultivation was done in TrMM plus 20 g/l yeast extract, 40 g/l cellulose, 80 g/l cellobiose, and 40 g/l sorbose at pH 4.5 with the temperature shifting from 28° to 22° at 48 h and grown for 6 days. Again the M675 strain produced slightly better than the M577 control strain. On day 3 the M675 strain produced 1.05 g/l and on day 4 slightly more 1.2 g/l. These results can be compared to the M577 levels of 0.84 g/l on day 3 and 0.60 g/l on day 4. The tre122069 regulatory protein deletion strain produced more interferon than its parental strain. The increase was observed under two different media conditions when the strains were grown in the fermentor.

To confirm these results and compare all the strains the cultivations were done in TrMM plus 20 g/l yeast extract, 40 g/l cellulose, 80 g/l cellobiose, and 40 g/l sorbose at pH 4.5 with the temperature shifting from 28° to 22° at 48 h for 6 days.

[0260] The fermentor supernatants were diluted so that 0.1 μl was loaded into each well into a 4-20% PAGE gel Immunoblotting was done to calculate the concentration compared to an interferon standard curve ranging from 400 to 25 ng. The interferon was detected with anti-IFN antibody (Abeam #ab9386) diluted 1 μg/ml in TBST. The secondary was goat anti-mouse IRdye 680 conjugated antibody (Li-Cor #926-68070) diluted 1:30,000 in TBST. Detection was done by near infrared fluorescence (700 nm) using a Li-Cor Odyssey CLX imager.

[0261] The results can be seen in Table 29 [TABLE 29 IS MISSING??]. In agreement with previous cultivations the M675 strain outperformed M577 control strain. On day 3 the M577 strain produced 1.2 g/l and 0.9 g/L on day 4. The M675 produced 1.1 g/L on day 3 and 1.4 g/L on day 4. The peak production day shifted was delayed by one day after the prp1 deletion. The prp1/ptf1 double deletion strain M843 produced significantly more interferon than both control strains. On day 3 it was 1.5 g/L and on day 4 it produced 2.4 g/L. The double deletion strain improved the production level 2-fold compared to the parental M577.

[0262] The single deletions of ptf1 in M845 and ptf2 in M847 affected the growth rate of the strains, as seen from the CO2 production and the base and sugar consumption profiles observed during the cultivations. The M577, M675, and M843 grew at a similar pace, but the M845 and M847 strains with ptf1 and ptf2 single deletions grew more quickly. Under these batch conditions the faster growing strains were running out of nutrients sooner than the other three strains. A side effect of growing too well under these conditions was that the faster strains were not able to reach high production levels. The highest production level was 0.9 g/L on day 3. By day 4 the faster cultures appeared to have nearly exhausted their sugar supplies. The best slower growing strains produced their maximum amount of interferon on day 4. More optimization of the culture conditions would be needed to see the maximal production possible from the ptf1 and ptf2 single deletion strains.

[0263] The single deletion of ptf3 in M958 seemed to reduce the growth of the strain under the conditions the strain was tested. Interferon production in M958 was 0.64 g/L compared to the parental strain 1.2 g/L.

[0264] There seems to be a special relationship between ptf1 and prp1. This was previously observed while doing transient silencing studies with siRNAs, because when both genes were simultaneously silenced there was a larger effect than when they were silenced alone. Silencing of these factors simultaneously led to a large mRNA downregulation of several protease genes including pep8, pep9, pep11, cpa2, cpa3, and amp3. This was one reason why these two regulators were deleted from the same strain.

[0265] There appears to be a downregulation of proteases in the M843 strain. Protease activity against casein was tested using the EnzChek protease assay kit (Molecular probes #E6638, green fluorescent casein substrate). The working stock solution was prepared by diluting the stock to 10 μg/ml in 50 mM sodium citrate, pH 4.5. The culture supernatants were diluted with sodium citrate buffer so that the total protein concentration in each would be 0.65 mg/ml. 100 μl of the diluted substrate was combined with the diluted culture supernatants in a black 96 well sample plate. The plate was then covered and kept at 37° C. for one to three hours. Fluorescence readings were taken at one, two, and three hours with a Varioskan fluorescent plate reader (Thermo Scientific) using 485 nm excitation and 530 nm emission. Control wells with supernatant without substrate were used as background controls. The nonspecific background signal was subtracted from specific protease activity measurement. Clearly the M843 double deletion strain generated less protease activity along the whole time course of the cultivation compared to M577 (Table 30). Between day 4 and 6, there was around 33% less activity. The reduced protease activity is the likely cause of the 2-fold increase in interferon production seen with the M843 strain.

TABLE 29
Interferon immunoblot data from Triab137-141 cultivations with M577,
M675, M843, M845, and M847 production strains. Two separate blots
were used to quantify all the samples. The strains were grown in
TrMM plus 20 g/l yeast extract, 40 g/l cellulose, 80 g/l cellobiose,
and 40 g/l sorbose at pH 4.5. The interferon in 0.1 μl of supernatant
was detected with anti-IFN antibody (Abcam #ab9386) diluted 1
μg/ml in TBST. The secondary was goat anti-mouse IRdye 680 conjugated
antibody (Li-Cor # 926-68070) diluted 1:30,000 in TBST. Detection
was done by near infrared fluorescence (700 nm).

| | M577 #1 | M675 | M843 | M577 #2 | M845 | M847 |
|---|---|---|---|---|---|---|
| | g/L | g/L | g/L | g/L | g/L | g/L |
| day 2 | 0.4 | 0.8 | 0.4 | 0.5 | 0.4 | 0.6 |
| day 3 | 1.2 | 1.1 | 1.5 | 1.1 | 0.9 | 0.9 |
| day 4 | 0.9 | 1.4 | 2.4 | 0.8 | 0.3 | 0.4 |
| day 5 | 0.3 | 0.3 | 0.5 | 0.4 | 0.2 | 0.3 |

TABLE 30
Total protease activity against fluorescent casein substrate. All
supernatant samples were normalized to 0.65 mg/ml of total protein
before adding casein substrate. The substrate was incubated in the
supernatant at 37° C. for 2 hours. Fluorescence was
measured using 480 nm excitation and 530 nm emission.

| fluorescent units | M577 | M675 | M843 | M845 | M847 |
|---|---|---|---|---|---|
| day 2 | 3.8 | 3.8 | 4.6 | 3.0 | 6.5 |
| day 3 | 5.0 | 4.8 | 4.3 | 6.9 | 7.1 |
| day 4 | 7.4 | 5.2 | 5.1 | 10.5 | 7.9 |
| day 5 | 12.1 | 12.2 | 8.4 | 10.1 | 12.7 |
| day 6 | 15.2 | 16.4 | 10.0 | 13.6 | 18.2 |

[0266] The regulator deletions have been made into the M577 strain where there were already 8 proteases deleted from the strain. Thus, the full benefit of the prp1/ptf1 deletion could not been seen. In the future the deletions will be made into the wild type background strain with a full set of proteases. This will reveal the full potential of the double regulator deletions.

[0267] Interestingly, prp1 (tre122069) is not a transcription factor, but it is classified as a BTB/POZ regulatory protein. A general property of the BTB domain is to mediate homomeric dimerization and is involved in heteromeric interactions with a number of proteins. BTB/POZ domains from several zinc finger proteins have been shown to mediate transcriptional repression and to interact with components of histone deacetylase co-repressor complexes. It is believed that histone deacetylase in the BTB protein complex modifies the chromatin structure needed for transcriptional repression. However, there are also examples where the BTB domain is capable of mediating transcriptional activation as well. The ptf1 is a more standard fungal transcription factor. The N-terminal region of the protein contains a Cys-rich motif that is involved in zinc-dependent binding of DNA.

### Example 5. Silencing Protease Regulators in the M843 Interferon Production Strain

[0268] Seeking to further improve the M843 strain, 10 candidate transcription factors and regulatory proteins were transiently silenced in 24 well cultures and improvement of interferon production was monitored via immunoblotting. The siRNAs were prepared as described in Example 1. These siRNA/lipid carrier complexes were added directly to 24 well cultures of M843 and dosed daily up to six days in culture. Two wells were used per treatment. Lipid only treatment was done as the mock control. The Trichoderma cultures were started with 1×106 spores/well and grown in TrMM with 20 g/L spent grain extract and 40 g/L lactose, pH 4.5. The siRNAs were added so that the final concentration in the 3 ml cultures was 200 nM. The siRNAs were added each day up to day 6 of the cultures. The siRNAs are listed in Table 31.

TABLE 31
siRNA sequences for transcription factor and
regulatory proteins.

| Gene abbrev- | | |
|---|---|---|
| iation | siRNA name | siRNA sequence |
| ptf2 | TRIRE105269 | CUCAUGUUGGCUGACGGAATT |
| ptf2 | TRIRE105269_2 | GCAAUCUCGCCGGCUCAAUTT |
| ptf2 | TRIRE105269_3 | GCAAGAUGCUUCCGUCACUTT |
| ptf3 | TRIRE59740 | GGUGCACGUUGCUGCCAAUTT |
| ptf3 | TRIRE59740_2 | CACGUUGCUGCCAAUUCAUTT |
| ptf3 | TRIRE59740_3 | GGUUGGACGUGGUCAUGUUTT |
| ptf4 | TRIRE76505 | GGCAAGAAGUUCUCUCGCATT |
| ptf4 | TRIRE76505_2 | CUGUGUAUCUCCAGUCCCATT |
| ptf4 | TRIRE76505_3 | CCCUUUGAGUGCAACGAGUTT |
| ptf5 | TRIRE103158 | GUCAAGAUGACGAUGAAAUTT |
| ptf5 | TRIRE103158_2 | CUGACAUCAAUCGGCGUAATT |
| ptf5 | TRIRE103158_3 | GAGCAAUUGCGGCACAGGATT |
| ptf6 | TRIRE103275 | CAAAGAAACGCUCCAGAAATT |
| ptf6 | TRIRE103275_2 | GAAACUCACACACAUGUUUTT |
| ptf6 | TRIRE103275_3 | CUCAUGAAGGCCAUCCAGATT |
| ptf7 | TRIRE106259 | CAGAUGGUCCUCACACAAUTT |
| ptf7 | TRIRE106259_2 | GUCUGGUGGUGCUGCUUCATT |
| ptf7 | TRIRE106259_3 | GGCAAGACGUGGUUCUGGATT |
| ptf8 | TRIRE106706 | GUUCAGUCUGCGUACGAUUTT |
| ptf8 | TRIRE106706_2 | CCGUAUUCCCAUCAUCAUATT |
| ptf8 | TRIRE106706_3 | CUUCAACUUGCUUAUGAAATT |
| ptf9 | TRIRE108940 | GAAGGAACCGCGAUUCAUUTT |
| ptf9 | TRIRE108940_2 | GAUUCAUUACUUCGAUCUUTT |
| ptf9 | TRIRE108940_3 | GUGCAUUGUGCUUCAUCUATT |
| prp2 | TRIRE102947 | GCGUCAAGGCCCUCGGCCATT |
| prp2 | TRIRE102947_2 | GCCAUCUCGCGACCCAGAATT |
| prp2 | TRIRE102947_3 | CCUUCAUGAUUACUGCCAATT |

[0269] The cultures were sampled on day 3, 4, 5, 6, and 7 and prepared for immunblotting with a rabbit anti-interferon alpha 2 b antibody (Abeam # ab9386). The interferon primary antibody was diluted to 1 μg/ml in TBST and incubated for 1 hour shaking at room temperature. A control mouse antibody against CBHI (mab261, VTT) was diluted 1:20,000 in TBST and incubated shaking at room temperature for 1 hour. The goat anti-rabbit secondary IRDye 680 (Li-Cor #926-68070) and goat anti-mouse IRDye 800 (Li-Cor #926-32210) secondary antibodies were diluted 1:30,000 in TBST and incubated with the blots for 45 minutes at room temperature shaking. The blots were washed with TBST for 1 hour before scanning at 700 and 800 nm.

[0270] Analyzing the samples from day 4, it was seen that all of the transcription factor treatments improved the production level of interferon. The ptf4, ptf6, ptf8, and ptf9 siRNA treatments resulted in production level improvements reaching over 2-fold (Table 32).

TABLE 32
Relative interferon expression levels measured from day 4 samples
taken from the siRNA treated 24 well cultures.

| siRNA | interferon | fold |
|---|---|---|
| treatment | (fluorescent units) | improvement |
| ptf2 | 653 | 1.3 |
| ptf3 | 788 | 1.6 |
| ptf4 | 1140 | 2.3 |
| ptf5 | 958 | 2.0 |
| ptf6 | 1175 | 2.4 |
| ptf7 | 764 | 1.6 |
| ptf8 | 1171 | 2.4 |
| ptf9 | 1334 | 2.7 |
| ptf10 | 714 | 1.5 |
| prp2 | 560 | 1.1 |
| Control | 489 | 1.0 |

[0271] The day 7 samples were similarly analyzed via immunoblotting to detect interferon expression and the secreted cellulase enzyme CBHI as a control. CBHI is the main secreted enzyme in Trichoderma reesei. Again all the treatments increased interferon expression over the mock control level (Table 33). The best treatments came from the ptf4, ptf6, ptf7, ptf8, and ptf10 siRNAs. Compared to the day 4 treatment results, the ptf4, ptf6, and ptf8 were again among the best again on day 7. Normalizing the results according to the CBHI expression level the ptf4, ptf6, ptf7, and ptf8 were the best improvements.

TABLE 33
Relative interferon and CBHI expression levels measured from day
7 samples taken from the siRNA treated 24 well cultures.

| | | | fold | |
|---|---|---|---|---|
| siRNA | interferon | CBHI | improvement- | IFN/ |
| treatment | (fluorescent units) | (fluorescent units) | interferon | CBHI |
| ptf2 | 827 | 1525 | 1.4 | 0.54 |
| ptf3 | 850 | 1355 | 1.5 | 0.62 |
| ptf4 | 991 | 1320 | 1.7 | 0.66 |
| ptf5 | 673 | 932 | 1.2 | 0.62 |
| ptf6 | 892 | 1325 | 1.6 | 0.67 |
| ptf7 | 1028 | 1370 | 1.8 | 0.75 |
| ptf8 | 911 | 1305 | 1.6 | 0.69 |
| ptf9 | 703 | 1305 | 1.2 | 0.53 |
| ptf10 | 904 | 1395 | 1.6 | 0.65 |
| prp2 | 602 | 1305 | 1.1 | 0.46 |
| Control | 571 | 1235 | 1.0 | 0.46 |

### Example 6. Cultivation of Strains with 3 Regulatory Protein Deletions in an Interferon Production Strain

[0272] The M843 strain where the protease regulatory protein prp1 and the protease transcription factor ptf1 have been deleted, went through marker loop-out, and the resulting pyr4-strain was designated M1070. The M1070 strain was used to produce new transcription factor deletions. Transient silencing experiments were conducted on M843 to evaluate whether additional transcription factors could improve interferon expression. The transcription factors ptf4 (tre76505), ptf7 (tre106259), ptf8 (tre106706), and ptf9 (tre108940) were among the best candidates. Deletion strains were prepared for these genes (as described in Example 3) in hope the deletions reduce protease activity and lead to higher interferon production levels. We were unable to get clean transformants for the ptf9 deletion in the interferon production strain.

[0273] The positive transformants from ptf4, ptf7, and ptf8 deletion strains were then cultured in 24 wells along with the M577 and M843 control interferon production strains. Two wells were used for each strain or transformant. In 24 well cultures the strains were grown in TrMM with diammonium citrate without ammonium sulfate, 100 mM PIPPS, 20 g/L spent grain extract, 40 g/L lactose at pH 4.5, shaking at 28° C. The supernatants were diluted so that 0.2 μl was loaded into each well into a 4-20% gel Immunoblotting was done to calculate the concentration compared to an interferon standard curve (200, 100, 50, and 25 ng). The interferon was detected with anti-IFN antibody (Abeam #ab9386) diluted 1 μg/ml in TBST. The secondary was goat anti-mouse IRdye 680 conjugated antibody (Li-Cor #926-68070) diluted 1:30,000 in TBST. Detection was done by near infrared fluorescence (700 nm).

[0274] The expression results from day 6 of the culture can be seen in Table 34. The original M577 strain contained 8 protease deletions and produced interferon at levels around 163 mg/L in this culture on day 6. The M843 strain was generated from deleting the ptf1 transcription factor and the prp1 regulatory protein. The resulting strain, as previously reported, produced 1.8-fold more interferon at 291 mg/L. This effect seems to be related to down-regulation of proteases. Starting from M843 strain we have now have separately deleted 3 other transcription factors. The best ptf4 transformant (461-13F) produced 1.5 times more interferon at a level of 401 mg/L. The top ptf7 transformant (462-18B) expressed also 1.5 times more at 450 mg/L. The overall best deletion was from ptf8, from which the best transformant gave 2 times more interferon than M843 and reached on overall level of 592 mg/L. Overall we have achieved an improvement from 162 mg/L to 592 mg/L by deleting 3 protease regulators. That is a 3.7-fold improvement. We do not yet know if the ptf4, ptf7, or ptf8 deletions have reduced the protease activity. We were unable to measure protease activity from these strains, because there are already 8 proteases deleted from the M577 strain. Future studies on the specific proteases affected by these regulators will be conducted.

TABLE 34
Immunoblot results detecting interferon expression from 24 well cultures
of transcription factor deletion strains for ptf4, ptf7, ptf8 and controls
M577 and M843. Two immunoblots were used to measure the interferon
concentration from all the samples. Control strains and standards were
included on both blots. A standard curve of 200, 100, 50, 25 ng of
interferon was used to calculate the culture concentration. Cultures
were grown in TrMM with diammonium citrate without ammonium
sulfate, 100 mM PIPPS, 20 g/L spent grain extract, 40 g/L lactose
at pH 4.5, shaking at 28° C. Immunoblot of interferon alpha
2b expression was made from 0.2 μl culture supernantat on
day 6 of culture.

| | interferon |
|---|---|
| Strain | mg/L |
| M577 #1 | 163 |
| M843 #1 | 266 |
| Δptf4-13B | 387 |
| Δptf4-13F | 401 |
| M577 #2 | 162 |
| M843 #2 | 291 |
| Δptf7-18A | 345 |
| Δptf7-18B | 450 |
| Δptf8-11A | 539 |
| Δptf8-11B | 592 |

### Example 7. Construction of RNAi Silencing Vectors for Protease Regulators and Protease Genes

[0275] RNAi silencing vectors are designed to contain target sequence in a single RNA hairpin molecule for multiple transcriptional regulator genes or a combination of transcriptional regulators and proteases genes.

[0276] The RNAi base vector pTTv436 contains a gpdA promoter to drive the expression of the hairpin RNA, sequence for targeted integration into the xylanase 1 locus (tre74223), and a pyr4/hygromycin loop-out marker. The 150-250 bp target sequence for each gene, intron loop, and cloning sequence containing DNA fragment can be synthesized by commercial providers. The artificially synthesised vector including the sense target sequence is digested with PmeI to release the target sequence fragment. The pTTv436 RNAi base vector is opened with FseI in the first step and the PmeI digested sense target sequence fragments is incorporated into the vector using yeast recombination cloning. The newly made pTTv436+sense target sequence vector is then opened with AscI. The antisense fragment is generated by PCR. The newly created antisense target sequence fragment is then combined into the AscI linearized vector using yeast recombination. The newly created vector expresses an RNA hairpin that is used for silencing all genes included in the construct.

### A Protease Regulatory Gene Silencing Construct

[0277] The antisense fragment is created by PCR with the following primers:

antisense_rev_prp2_ascI_loop
GAGAGAAGGGCACGTACTTACAAACACATCTCTTGCATAGGGCGCGCCCT
GGAGTGTCTTGATCATCA
antisense fw_prp1_asisI_vect
GTCAAGCTGTTTGATGATTTCAGTAACGTTAAGTGGATCCGCGATCGCGG
TGACCTGTTTACTCAGTT

The following DNA fragment may be purchased from commercial sources to make the first part of the vector as described above. It contains 150 bp target sequence for 12 protease regulatory genes and an intron loop needed for hairpin formation. The silencing vector is constructed as described above with the pTTv436 RNAi base vector, target sequence DNA fragment, and PCR created antisense fragment. The final vector is shown in FIG. 1. The siRNA sequence of FIG. 1 is disclosed in SEQ ID NO: 131.

### Multiple Protease and Regulator Gene Silencing Vectors

[0278] Silencing vectors containing target sequences for protease genes and protease regulators were created in the same general way as described above with the pTTv436 RNAi base vector, target sequence DNA fragment, and PCR created antisense fragment. Three silencing vectors were made with proteases and regulators: small and large combination vectors with protease regulator genes and the third one, carboxypeptidase silencing vector, which can be constructed to include the regulatory genes.

[0279] The small combination RNAi vector contains the following sequence and was synthesized by a commercial provider. It contains 250 bp target sequences for 9 protease and 2 regulatory proteins. The vector map can be seen in FIG. 2 and the DNA fragment sequence is shown in SEQ ID NO:132.

[0280] The large combination RNAi vector contains the following sequence and was synthesized by a commercial provider. It contains 150 bp target sequences for the following 19 protease slp7, tpp1, mep1, mep2, tre4308, mep4, mep5, pep8, pep9, amp7, lap4, tre66608, tre81115, tre111694, tre21659, tre21668, tre77577, tre23475, prp1, ptf1, slp3 and 2 regulatory proteins (prp1 and ptf1). The DNA fragment sequence is shown in SEQ ID NO:133.

[0281] The carboxypeptidase RNAi vector contains the following sequence of SEQ ID NO:134 and was synthesized by a commercial provider. It contains 150 bp target sequences for 7 carboxypeptidases. A further variant of this RNAi vector can include protease regulator target sequences for prp1 (tre122069) and ptf1 (tre3449) to create combination vectors as done with the small and large protease and regulator vectors described above.

[0282] The synthesised vectors including the sense target sequence were digested with PmeI to release the fragment. The pTTv436 RNAi base vector was opened with FseI in the first step and the PmeI digested sense target sequence fragments were incorporated into the vector using yeast recombination cloning. The newly made pTTv436+sense RNAi target sequence fragment vector was then reopened with AscI.

[0283] The RNA antisense fragments were created by PCR using the following primers::

T1615_antisense_rev_slp3_ascI_loop
GAGAGAAGGGCACGTACTTACAAACACATCTCTTGCATAGGGCGCGCCTT
CAGGGTGGTTGCGAAGAG
T1772_antisense_fw_slp7_asisI_vect
GTCAAGCTGTTTGATGATTTCAGTAACGTTAAGTGGATCCGCGATCGCCC
GTTACCTTGGCCGCGAAG

[0284] The carboxypeptidase antisense fragment was created by PCR using the primers:

T1773_antisense_rev_cp2_ascI_loop
CCTCGATATGAAAGTCTTCACCGCTGACTTGCTGCTCTAGGGCGCGCCCGT
CTACGTTGACCACGGGG
T1774_antisense_fw_cp3_asisI_vect
GTCAAGCTGTTTGATGATTTCAGTAACGTTAAGTGGATCCGCGATCGCTTT
AGCGGTGGCTCAACTGC

[0285] The newly created antisense target sequence fragments were then combined into the AscI linearized vector using yeast recombination. The final RNAi silencing vectors may be transformed into T. reesei strains to provide gene silencing of multiple protease and protease regulator genes.

[0286] siRNA sequences used in the expression vectors for the regulatory proteins and proteases are further disclosed in SEQ ID NOs:135-186.

The application's sequence listing, which the Patent Office published only in electronic form, follows.

SEQUENCE LISTING (360 sequences)

SEQ ID NO: 1 - protein, 753 aa, Trichoderma reesei
MTAPLAQPTVAVAAKDTAATIRKRRRRAPAGGATDDCFTCSKRNVKCDRRRPYCSQCLEIGNECSGYKTQLTWGVGVASRGKLRGLSLPIAKAPPVTREPKKSPVSRARAQSIPAYDYLSISHHGHAPSLSQSSWGSVGYAPSLVHSPDGTPRYTRYPLHLSTDALSSSCESVGSEVDYLSPLSQSYAREEIPFNHSPTVLYEGYPAQHSSPIAQSPPTVLVLDHCRAPTSYPGLVYAPSEAHHALSHHHMDPFESHLGHKLMRGCESLTGGKTALVAKMPFFMDYFRITMAPSMVFIDGPHNPFREHVLRLARESPSVQHAICALSACNLRMKRRLSLGYGTSELLATLMAEKLTTEATSGSELEDKSLSEEIQHRNMAVHLLNQQLGDPSRLCHDSALATILLLCHYRMVESGIAKFHTQFAGVRKILAMRQSRDSTPPKDSTWMEALFTYFDAISASINEREAQLAPGFEGVSPDVQDLPAGSENIIGCDRKLFKTIGKLGRLNLLSQHRPVQGMSEPLQQQQEAHGRTEPSLTPRSGENDLTTKLDNDDEMLASAMYSSVSFDERQYLFWREWKAARQELQDWRFDATSVAMSLPCSPTTGQVRDLGSVSEAFRYAALLYSERLANPQEPSTHSNFQNLVSQVIHHATSLEASSAAEKFLLWPLFVAGSECIVESQQSIIRDKCRGIMSRSGYMNNLAALAVLERLWSGDDVKSEAKLCYYDAAATARGPFNWTKCLGGPGAGVEWIMF

SEQ ID NO: 2 - protein, 249 aa, Trichoderma reesei
MGDLFTQSHAISLCMLMTSAQTEGAMCDLELVCDGQTIRVHKLVVCLQSLVLRAACTGLFEEASGRYEMKDCEFASVQRMVDFFYNGDYDAKASDETESSEEMLIHVAMFTLADKYIIDGLRTLSQIKFKAVVTKQEKPSVMPQYVKLVYDLECESSKRLRDVVIEAVRLRVAALPSDSDIKKTLEGLMDDIPDFAKDLAMSYIEKPQYTTWLGDYEKPANPTTTAPNFPRVSPWNFAEAARRKRGIAR

SEQ ID NO: 3 - protein, 872 aa, Trichoderma reesei
MSSNDPSVRRILPQDAPNAQNAGLNSYTFAPQQFPQRETQKNYVFVDEHNRHKRLKVMRACEGCRRRKIKCDAATTNTWPCSACIRLKLHCVRPNGYDGATDSTTYETFVPPTNQFQQMGMPSHQPGQASLKSETDIYAPQGGYSDGSSTSFQAIYDPSQPQHNLNYTTVPPQMSLVDQQVAPQDAFPTPPMQQSSQQGSSPGAYSADSYQQQDLADLLGGLKMNEIGTAPYLRNKASFRREEPAVEDEDEEFNLPPISIGAGHRIRIPPELMPDEGTAIHYFDLYFTHVHPYVPVLDRSMFYRQWTTSRESISPLILEALFAIGGRLADEPAQGQQWLALASRHADAFMDVPRLSTLQALLMILKAREAAPKRGYYYRSWMTVVQCVQMAKDLSLEEHYEEHQAGRHCGFSPAECQLRTRIWQTVFVCEVMVGTPQDSVDFSVPKPIPGGDDAEYHVSRNFTYFARNVRNIARITNIYVRLKKKKDWGLDPEFQQMDHAFNSFLAELPSDLSVTFPPDGSAPWLPSPFLGNLHSYYYLTLILFHRPQLSFFDPTTQEAQWKHHMMICYNAARALCRLQEAVLNSFGTMGLQCMQRGFSFTVYAGLSCIVLHLVAIVSPDPDLHTDARQFFTRHMRIMEKVMEAWPMPELQRQIDAVREAFSADVRKPFALKPSFPYGSPHPSHSASPPGYRGVQRAGSMDQALDSSGGQTVSYLSHPISPPISNGPLDSKSDSPSAQSLVMMPQAVGPGISPNMALPEQPAWNPAKIFEQWNTTFGTPAQSDPNPVSPASSLNMSSSSGAPEVPTIDDVHAVNSSLSAGSQHSIPPHQYAAAPVPTFITPAMWQQSVASVYEGGLKRSWDYDGTTPAMKRR

SEQ ID NO: 4 - protein, 373 aa, Trichoderma reesei
IKFTPRNNSQLLALLPGDADTFSDIVYLISEYEGVMDRSESLAANLGAKLTGPRFLRGLERFFEGPISINSPNPDAQQVTWLDVVMLAKASPDAFALVSLPSGARCCQFIYQGLQVEITEDDWRLISSGALDRFPLEHTFEEDEAAELATLEILQQRALLLHRRADEVAERAQILRQRLELRRHVISRRQQLHNGTSSSSSSSGSSSSSGSSSSSSPSFHAINHLPRSAISSHFDLHADLLQQFTTAAMQNSPPSGAPPEYQPRPTSVSSQGSLAPPSLEAPPYQPPSAAEPPLAPAPAPMSTSAAIYRPLVLQKTDTLNKGDVIFPPCDRCRRLRLQCIKHLTACRGCTKKHARCNWRNITDDEAAAIKEDL

SEQ ID NO: 5 - protein, 617 aa, Trichoderma reesei
MELPVPATRRRETVDCFNCAASRRSCDRTKHRCDTCAKSSEHCEGYPRALQWLTGVTSRGKQKGHSISIDASNTAWESTTPTNHTFIFKQGRPPRRGRVEVGTLKQKWKARSRDTEAHDCRQVIIRAESSQPDACVDSQPRDEMAAQDMSDFDAFATLDVASDTVNTHDHPALTYNHETPSAIPLASESSSLRWKDTSDFTGDNDLLVPSVEAYGEAYSAPLTPQPTIGSSGLLAFYDAELCTLPLTFDFSANPFRCNSDPSQGPQYLLHALLAFSIQHVSRLGNLACKDLTDQQIASYRYSANNQSTIELIFAGDSTKHFVVDTILILFALDTLTSAAGPWYSRLSDAFQKLETLGGVNAVASSSRFQAQIAMFVWWDCSISLISRSQPVFPSSYYDFVLSCDDSSWSIFTISGVPRQLFQYFRELLQLAYEKEQISSLRYATFDMSRVRELEQYIQEYSDEGCEMYGACADEETVQSAYDYYHASNTWKYALLLYICRVFNWDRTSSASMAQISSLSRQLLDSARCCRPESSLQKQFLIPIFLAGAEATGAYSRNFARDYCEGWYRKSRYNMFIEAAHLMEEIWRQKDAHDGASGIWWGSLIEPRRPNASEFLFG

SEQ ID NO: 6 - protein, 572 aa, Trichoderma reesei
MERQTDLRVQLNAEEEERPVIIRACDMCRKKKIRCEPTSQGCGPCTKYGTRCHFTPIATKRKPRRPAGFRYIAQLEQRLLGVEALLEDRSLGKPTVTDINRRKKQTTPVALLNTAADLSTLGGYVTDGLWPHPAPELRPASLPALQPLPTKAFAQKLVEDMFSNYNKYLPLFDEEDFLTEFHLKYESSSPRDAGWWACLNVVLSIAHRLRSIRAADPTQDHNLAYGYVHNAFSVISELNVSDRSLSAVQALAGMACILQGTPDPAPAAMLVAAALRLAQAMNLHRECSSPGLTEAEAEKRRRVFWKVYILDKDISLRTGRPFGQDDDEMDVRLPSSSSFEDGNLGLFNCRIGLALVQGQVYKQLYSVRAGRQTAAQRAIAAQELSTLLSYWKSSAQSYLPEDSTTLSGLPLSGEMIHKVVLRLTYLHCLTMIDRHLAPMAQPSSYLQLSMSERLSSSPPGSLCVTESRKAIRLVEAIPQGDCACVWMLLHAFFAAASSMLINLSRHPLSPDATSDLDLVEPFLRLLETLARDSSTLSQSEELARMRRTCNRLNFEAKEAIHLFSTMPPATLA

SEQ ID NO: 7 - protein, 506 aa, Trichoderma reesei
MALAAQQHTQADWGRWSHQIPQSFPMMGSPGFMSYDPRAQDGSQMQRQVSAQYLVNSNYNQPPMPTASSPQYQHAGPFSYVPYHSPPPSTPLGSPFKSEFPEHPLTRMTHSTVDRHHSQAMRDYQPYSPVSRRGSISSVATKPSAAPVTPGPTTPGSFTSSSDAQSPSTPNPQTASQPVSSKTLTYNETVHPGDRISFRTDVDELMKAIQKTQTTDECQQTLTPARTPKNCTTSTPVLRTQSGKPRKQWVCDGPNCGKAFVQKTHRDIHRRTHTGHRPYVCTMENCGLTFSQRGNLKTHIRRHTGEKPFSCAACGKCFAQRGNLRSHEETHKGLKPFVCRLDDCNKSFSQLGNMKTHQNNFHKETLQKLTHMFVQFSENGEVPRDYQDLFEYFQKHYKNSNKGVKGRGKTRAVAARGPQDSAFRQAASPVPALLKTPATTHLPQMTMPAHDPHGRISPYAMTQGAANTLSNVLRNPNPSYGLYGPTFAPGPVRDGVFHMGIASHLS

SEQ ID NO: 8 - protein, 773 aa, Trichoderma reesei
MRRQNHSCDQCRRSKRGCDAPSLEAGQRSSNLWQLNNGNSSFKCSYCNKTNKTCTWEWAKAQTLQRAIAYGSKSPLKGISGRRHPLMDYSIPNDIPSLRTEVSEDPTTTSDLPGDADATISYTIEPQLSEYPPGSDAISPAQYCYPLQDDGLRSLTKRRRLSSNGSGSQRTSLSRFSVDQEMMSHTNSQLISTNLLQIYHDVLEHNLSCWLTEINNPLTTQSRHGDTENRAGLVREWGTAWSNRIYTRAIQLDRESISANLVRLTPAQDASVTNALHLAIMAFATQWAQGSHRQRERYPTTSTSSGDESDGFAEEFDRSLQHQIWAQAKRALQDVDELESYRVALAELIFGLTQKAWNHEPGDRDLGGTTNIRSRGVGLESEVKARLGDIMSREGPPIYMERAARKVQTLQARYNAGLRGIGSSVVINNGVEAAGNSQFFSSKENKETAGLLYWFAVMFDTVSSSMNERPVVVPDEDIPRYTDEDLPDTATEDDTPPQGRWDVGSFVHDDVENPAYKPTWPCPYEDAAKAVTKAAPVKVLLFRHLSYLQGTLRRGARGERVEDIISSTLSLYRYWNKTYGSFFRELMLDVDSVPERIRSWFFCISCHWNLAALMIADLVAFVDNNNLGTDIETRARTEGRIAWRIRDASTQELSELAVISIPCQGLHDDSNFHHAVNEGTILTEPWTMILIRAFSMASAILLGEADEALRHGAAQLGYTGGHFEETLGKVMNCIKALWHLGKKSDMARKAADFLSLTTDRLQADYGTGGVVIG

SEQ ID NO: 9 - protein, 534 aa, Trichoderma reesei
MDGMMSQPMGQQAFYFYNHEHKMSPRQVIFAQQMAAYQMMPSLPPTPMYSRPNSSCSQPPTLYSNGPSVMTPTSTPPLSSRKPMLVDTEFGDNPYFPSTPPLSASGSTVGSPKACDMLQTPMNPMFSGLEGIAIKDSIDATESLVLDWASIASPPLSPVYLQSQTSSGKVPSLTSSPSDMLSTTASCPSLSPSPTPYARSVTSEHDVDFCDPRNLTVSVGSNPTLAPEFTLLADDIKGEPLPTAAQPSFDFNPALPSGLPTFEDFSDLESEADFSSLVNLGEINPVDISRPRACTGSSVVSLGHGSFIGDEDLSFDDEAFHFPSLPSPTSSVDFCDVHQDKRQKKDRKEAKPVMNSAAGGSQSGNEQAGATEAASAASDSNASSASDEPSSSMPAPTNRRGRKQSLTEDPSKTFVCDLCNRRFRRQEHLKRHYRSLHTQEKPFECNECGKKFSRSDNLAQHARTHSGGAIVMNLIEESSEVPAYDGSMMAGPVGDDYSTYGKVLFQIASEIPGSASELSSEEGEQGKKKRKRSD

SEQ ID NO: 10 - protein, 423 aa, Trichoderma reesei
MNMTTTLPLVGGREEKPQQTQTQAQQPRKKHAKLFHKKSRTGCQRCRIRRVKCDEAKPICNNCTRLDLECGYGPPASSPASEGDAVSTSTALSVEHDLVDSHGILYLPETEARRKLELELFYHYATETAPTLGTEKSAQDFIGPALCRAALQSDAVLYGLCMLSALHKAYKSNFSEPQHMQHHSTYLNLTLQSHHKHVARLDIDNVDYSCMVSSTLRVYAYVQLQRRELEPYTPPIEWLRMSNTSTIVFRKALALIEKNPGSLSGRLTLEISHHLDEKRRLEHSDELLYLLRRQEPHELEEEWDDDVYHVYRRTLSCFGWVWKHRFVSPPPPGMSRRIYLFPMIVDAQFVDYVAQRRPRALVVLAHYFTLLALHRDFWYVGDAGFREVRAIAAEVPAEWQGMLAQPLELLENPSLLCKIPSYR

SEQ ID NO: 11 - protein, 633 aa, Trichoderma reesei
MLDEPEGETAPKDGPRDLLEEFAIESHCLDAPMSMEDLELLRADIESDKSPRDSLSDMVDTFNLPNYVRPLTSLPPDDMEFLHAEGALTLPDSALQNALLRAFFEYVHPYVPTLDLDAFLHSIETPDGSAGQVSLLLLQAVLAAGTAHVELHHLRNAGYQTRKQARTAFLKRVRLLYKYNCELDQMVLTQSLLLITSWQDASDEHGKTWFWIDAAVSHAFAAGLHLEPSVNKPNLSRRKQRLRRRVWWCCFIRDRLLSLGMKRPPRIKDGDFQVAMLDEADFQPEQIRSDDGDHARFEAVCVYVRSRKKRAELARMCVAQATLCRSMSFLSSSMYVAPHDSLAVPSSSSQEAGATRARPRADDGGEQKLFTTYIRDLLEWRDGLPEGVSYRPISSSDIGRDGNTSISLDRAVLHMIYYAAVLCLYRSRFVALLQQQQQQQQHGAGDSSSSSWSMEKELCKTYMQHSAKRIGDIARNIYDHGLDRLLPSMAANIAVSAASVHLLELRGQLQGCGTEPSYRQSRRLMQSMHDIYAGADLSRESLKWHEEEEQQQQQERREKEEKGMSWSSPGGEVAAETGGKEEKEEEDYLVADADWLKDLEAATCWYVAEPYRADSFLQYPGEGLDVVNEFFAF

SEQ ID NO: 12 - protein, 267 aa, Trichoderma reesei
MAPVPTAGVDFRDLLRSGQFSDLTVVCRGIEFKLHKVIACLQSPVFLAAVNSDFQEGRTGVIKIDQFDPETVRRLVEFLYTGDYGRQPQEPQPVQEQTQGTVLHVRVNAIADYYGVKALGHLATQKIKQAFQDKWDPQTFMITAKEALGASGDKTLHDAMARIAAENMTDLVGCPELTDLVGDFAAEIMRHQGKKHADLVAMHLHAELGTARVVARFRKIIEEINQREYCRNAACAEASFGCNIEQVDNPVGEPTYILRCSYCRCRH

SEQ ID NO: 13 - DNA, 2262 bp, Trichoderma reesei
atgactgctccgttagcacaacccactgtggccgtggctgccaaggacacggcggctaccatccgcaagcgcagaagacgcgcccctgctggtggtgccacggacgactgcttcacatgctctaagcgcaatgtcaaatgcgatcgacgccggccctactgctctcaatgcctcgagatcggcaacgaatgctctggctacaagactcagcttacctggggtgtcggcgttgccagccgcggcaagcttcgcgggctctccttgcccattgcaaaggcacctccagtcacccgcgagccgaagaagtcgcccgtctctcgggcaagggcgcagtccatacccgcgtacgactacctctccatctcccaccacggccatgccccatcgctgtcccagagcagctggggaagcgtcggctatgctcccagccttgtgcactcgccagacggaacaccaagatataccagatatcctctccatctcagcaccgatgcgctctcctcgtcgtgcgagtcggtcggcagcgaggtggactacctttctcctctgagccaatcttatgctcgcgaagagattcctttcaaccacagcccgactgtcctgtacgagggatatcctgcacagcatagctcccctattgcgcaaagccccccaaccgtgctggtgcttgaccactgccgcgcccctacgtcttatcccgggctggtctatgccccctccgaggcccatcacgcactcagtcaccaccacatggatccctttgagtcgcaccttggccacaagcttatgcgggggtgtgaaagcctcactggtggcaagacggctctggtggccaagatgcccttcttcatggattatttcaggatcaccatggccccttccatggtctttatagatgggccccacaacccgttcagagaacatgtccttcgcctagcacgagagagcccaagcgtgcagcatgccatctgtgcgctgtcagcttgcaatctgcgaatgaagaggagactgagcctgggatacggaacaagcgagttgctcgcaactcttatggcggagaagctgaccaccgaggcgacttctggatccgaactggaggataagtcactttctgaagagatacaacaccgaaacatggccgttcatctcttgaatcagcagctcggcgatccatcaaggctgtgccatgactcggcactcgcaacaattcttcttctctgtcactatcgaatggtcgaatccggcattgcaaagttccatacgcagtttgcaggcgtgcgcaagatccttgccatgaggcaatcccgagactcaactcctcccaaggactctacatggatggaggctctgtttacctactttgacgccatttcggctagcatcaacgaacgggaagcacagctggcgcctggcttcgagggagtttctccggacgtgcaagatctgcctgcaggatccgagaacataattggatgtgatcgcaagctcttcaagacaattggcaaactaggtcgcctgaacctcttatcgcagcatcgtcccgtacaaggcatgagcgagccacttcaacagcagcaagaggcccatggacgcaccgaaccgagcttgactccgcgctcaggcgaaaacgacttgaccactaagctcgacaacgacgacgagatgctcgcctctgcgatgtattcatcggtatcctttgatgaacgccaataccttttctggagggaatggaaagccgcacgacaagagctacaggactggcgattcgacgcgacctcagtggccatgtcactaccatgttcaccaaccacaggccaggtgcgcgacctgggatctgtttctgaggcattccgatatgcggctctgctctactctgaacggctagcaaacccacaagagccttctacacacagcaacttccaaaatctggttagccaggtcatacatcacgcaacaagtctggaggccagtagcgccgcagaaaagttcttgttgtggcccctgttcgtggctgggtcagaatgcatcgtggagtctcagcagagcatcatccgcgacaagtgtcgcggcatcatgagccgatctggctacatgaacaacttggcagcgctggctgtactagagcggctgtggtcaggggacgatgtcaagagcgaggccaaactctgctattacgacgccgcggcaactgccagaggtcccttcaactggactaagtgcctgggcgggccaggcgccggggtcgagtggatcatgttctga

SEQ ID NO: 14 - DNA, 750 bp, Trichoderma reesei
atgggtgacctgtttactcaatcgcacgctattagtctttgtatgctcatgacgagcgcgcagacggagggcgcgatgtgcgatctcgaactcgtttgcgatggccagacaatcagggtccataagctcgtcgtctgtttgcaatctctagttcttagagctgcgtgcaccggcttgtttgaggaggcctcggggagatatgagatgaaggactgcgagtttgccagcgtccagcgcatggtggacttcttctacaacggagactacgacgccaaggcatccgatgagacagagtcctctgaggaaatgttgatccacgtcgccatgttcacgctggcggacaagtatataatcgatgggctgcgcactctctcacagatcaagttcaaggcggtcgtcacgaagcaggagaagcccagcgtgatgccacagtacgtcaagctcgtgtacgacctcgagtgtgagagcagcaagaggctccgcgacgtcgtgattgaggctgtccggctgagggtcgccgcgctgccgtctgactcggacattaagaagacgctggagggcctgatggacgacattcccgactttgcaaaggaccttgccatgtcgtacattgaaaagccgcagtatacgacgtggctcggcgactatgagaagcctgccaatcccacgacgaccgctcccaatttcccgcgtgtgtcgccttggaattttgctgaagcggctcgtagaaagcgcggcattgcgaggtag

SEQ ID NO: 15 - DNA, 2619 bp, Trichoderma reesei
atgtcgtcgaatgatccttccgtccgtcgcattctgcctcaggacgcaccaaacgcacagaatgcaggattgaacagctacacctttgcgcctcagcaatttcctcagagggagactcagaagaactatgtgttcgttgacgagcacaatcgccacaagaggctcaaggtaatgagagcctgcgaaggctgtcgcagacgcaagatcaaatgcgatgccgctaccaccaacacctggccttgctctgcctgcattcgcctcaagcttcactgcgtccggccgaacggatacgacggcgcaactgattcaacaacatatgagacctttgtcccgccgacgaatcagttccagcaaatgggaatgccatctcatcagccaggacaagcttccctcaaatccgaaactgatatctatgcgccgcagggcggctactcagacggatcttcaacttcgtttcaggccatatacgatccctcacagcctcagcataaccttaactacactacggttcctccgcaaatgtccctggtcgatcaacaggtagccccccaggatgcatttccaacaccgcccatgcaacagtcgtcgcagcagggctcctcaccaggcgcatattcagccgactcttatcagcaacaggatctggccgatctcctgggcggcctcaaaatgaatgagattggaacagcgccgtaccttagaaacaaggcatccttcagacgggaggaacccgccgtcgaagacgaagatgaggagttcaatttgcctcccatctcgattggggcagggcataggatccgtatcccccctgaactgatgccggacgaaggaaccgcgattcattacttcgatctttactttacccatgtccatccatatgtcccagtactcgacaggtccatgttttaccgccaatggactacctcaagagaatccatttccccgttgatcctggaagccctgtttgccattggaggccgtctcgccgatgagcctgcacagggtcagcaatggctggcgctggcatcaagacatgccgacgctttcatggacgttcctcgactaagcaccctccaggcgctgttgatgatcctcaaggctcgggaagccgctccgaaacgaggctattactaccgctcgtggatgaccgttgttcagtgtgttcagatggccaaagacctttcgctagaagagcattatgaggagcaccaggccggccgacattgcgggttcagccctgcggaatgtcagctgcgcacgcggatctggcagacagtctttgtttgcgaagtcatggtgggcacgccacaagactctgtcgatttcagcgtgccaaaacccattcccggcggagacgatgccgaatatcatgtctcgcgaaactttacgtattttgctcgcaacgtccggaacattgccaggatcacaaacatctacgttcgtctaaagaagaagaaggactggggactcgatccagagttccagcagatggaccacgccttcaactcattcctggcggagcttccaagtgaccttagcgtcacattcccacccgacggttcggcgccgtggctgccttcgccgttccttggcaatctgcactcatattactatttgacgttgatcttgttccaccgtccccagttgtcgttctttgatccgacaacccaggaggctcagtggaagcatcacatgatgatctgctacaatgccgctcgtgctctctgccgactgcaagaagctgtcctcaattcgtttggaaccatggggctacagtgcatgcagcgcggcttcagttttactgtctacgccgggctctcgtgcattgtgcttcatctagtagcaatcgtctctccagatcccgatctccataccgatgcgcggcagttcttcactcgccacatgaggatcatggaaaaggtgatggaggcgtggccaatgccagaactgcagagacaaatcgacgccgtcagggaggctttctcagctgacgttaggaagccctttgccctgaagccgtctttcccatacggaagccctcatccatcgcatagtgccagccctcccggataccgtggtgtccagcgcgctggttccatggaccaggcactggattcgagcggcggtcaaacagtcagttacctaagccatcccatctcacctccaatctccaatggccctctggacagcaagagtgactccccatctgcacagtcgctcgtcatgatgccacaggctgtcgggcccggcatctcaccgaacatggctctaccagagcagccagcctggaacccggcgaagatatttgaacaatggaacaccacatttggtacgcccgcccagtccgatcccaatcctgtctccccggccagctcgctcaacatgtcctcgtcctcaggtgcacccgaggtccctacaattgatgacgttcatgccgtaaattcctcgttgtcggccggctcacaacacagcattccgccacatcaatacgcggctgcgcctgtgccaacttttatcacgcccgcgatgtggcagcagtctgtcgccagcgtgtacgaaggcggcctgaagcgctcgtgggattatgacggaaccacgccggcaatgaaacgtcgttag

SEQ ID NO: 16 - DNA, 1119 bp, Trichoderma reesei
atcaaattcacgccaagaaacaactcccagcttttagccttgctgccaggcgatgcagataccttcagcgacatcgtctacctcattagtgaatatgaaggcgtcatggaccgcagcgaaagccttgcggccaatcttggggccaagctgacaggtccccgattcctacgcggcctcgaaaggttcttcgagggcccaatcagcatcaattcgcccaatccagacgcccagcaagtcacctggttggacgtggtcatgttggcgaaagcgagcccggatgcatttgctctcgtctccttgcccagcggtgcacgttgctgccaattcatttaccaggggttgcaggtcgagatcaccgaggatgactggcgcctgatctcttccggagcactggacaggttcccactggagcacacgttcgaagaggacgaggcggccgagctggcgacactcgagattctccaacagcgggccttgctgctgcataggagggcagacgaagttgcggagagggctcagatcctgcgtcagagactcgagcttcgcagacatgtcatttctcggcggcaacaactccataatggcacctccagctccagctccagctccggctccagctccagctccggctccagctccagctctagtcctagcttccatgccatcaatcacctaccgcgttccgccatcagctcgcacttcgacctccatgcagaccttctccagcagtttaccacggctgcaatgcaaaacagcccaccgtcaggggcgcctccggaataccaaccacggcccacgtcggtgtctagccagggttcgctggcaccgccgagcttggaagcaccgccgtatcagccgccctcggccgcggaaccacccttggccccggcaccagcccccatgtcaacgtcggctgcgatatacaggccccttgtactgcagaagacggacacgctcaacaagggcgacgttatattcccaccctgcgaccgatgccggcgtctccgcctgcagtgcattaagcatctgacggcgtgtcggggctgcaccaagaaacacgcgagatgcaactggaggaacatcactgacgacgaagccgcggctataaaggaggatctg

SEQ ID NO: 17 - DNA, 1854 bp, Trichoderma reesei
atggaattgcctgtcccggctactaggcgacgcgagacagtcgactgtttcaattgcgcagcatcacggcgatcctgtgatcgaacaaaacaccggtgcgatacctgcgcgaagtcgtccgagcactgtgagggatatccaagggcactccagtggctcacaggcgtcacgtctcgggggaaacagaaaggccactctatcagtatcgacgcttcgaacactgcgtgggaatccacaacaccgacgaatcacaccttcatattcaagcaaggacggccaccgagaaggggcagagtcgaagtcgggacccttaaacaaaaatggaaggctagatcaagagacacagaggcgcatgactgtcgacaggttatcatccgagcagagtcaagccagcccgacgcgtgtgtagactcacagccgcgcgatgaaatggcagcgcaagacatgtctgactttgatgcctttgcgactctcgatgttgcttcagataccgtcaacactcatgatcatcctgctttaacatataaccatgaaactccatctgccattccactcgcctcggaatcatccagtcttaggtggaaggatacgagcgatttcacgggggacaacgacctcttagttccatcggtcgaagcttacggcgaagcatactcagccccgctgactcctcagcccaccattggatcatctggactgctcgctttctacgacgccgaattgtgtactcttcccctgacgtttgacttttcggcgaatccgttccgctgcaactcagatccatcccaggggcctcaatacctcctccatgcccttctagccttctccatacagcacgttagccgtttgggaaacttggcatgcaaagacttgacggatcagcagatagcgtcgtacaggtattctgcgaataaccaaagcacaatcgagctcatcttcgccggggattctacaaagcacttcgttgtcgataccattttgatcctctttgcgctggatactcttacctctgccgccggaccttggtattcgcgcctaagtgatgcttttcagaagctagaaacgcttggtggagtgaacgcggtggcgagctcttctcgatttcaagcgcagattgccatgtttgtttggtgggactgcagcatctctctcatctctcgatcgcagcccgtattcccatcatcatactatgatttcgtgctgtcctgtgacgatagttcctggagcatcttcaccatatcaggagtgccacgacaattatttcagtacttccgcgagctgcttcaacttgcttatgaaaaggagcaaatatcatcattgagatatgcgactttcgacatgagtcgagttagagaactcgagcaatacatacaagaatactctgacgagggctgcgaaatgtacggcgcatgtgctgacgaagaaactgttcagtctgcgtacgattattatcatgcgagcaatacttggaaatatgctctcctactgtacatctgccgcgtcttcaactgggacagaaccagcagcgcttcaatggctcagatctcatcgctttccaggcaattgctagacagcgcgcgatgctgcaggccggaatcgagccttcaaaaacagttcttgatcccgatattcctagccggcgcagaagcgaccggggcttattcgagaaattttgcaagggactactgtgaaggatggtacaggaagtcgagatataacatgtttatagaagcggcacatcttatggaagagatctggagacaaaaggatgcccacgacggcgcctccggcatatggtgggggagtctgatagaaccaaggcggcctaacgcgtctgagtttctatttggatga

SEQ ID NO: 18 - DNA, 1719 bp, Trichoderma reesei
atggagcgacaaacggatcttagggtccagctaaatgccgaggaagaggagcggccagtcattattcgtgcttgcgacatgtgccgcaagaagaagatacgctgcgagcccacttcgcaaggatgcggtccatgcaccaaatatggcacaaggtgtcattttacgcccattgcaacgaagaggaagcctcgcagaccagctggcttcagatatatcgcacagctagaacagaggcttctgggagtagaggctttgctagaagacaggtcattgggtaagccaactgtgactgacatcaatcggcgtaaaaagcagacgacacccgtagcgctactgaacacagcagccgatttgtctacgcttggaggttatgtaaccgacggtctgtggcctcatcccgctccagagctgcgcccagcttctcttccagccctccagccgcttcccacaaaggcattcgctcaaaagttggtcgaggacatgttcagcaactataataagtaccttccgctattcgatgaagaggacttcttgacagagtttcacctcaagtatgagtcttccagtcctcgtgacgctggttggtgggcatgcctcaacgttgtgctgtcgatagctcatcgcctccgctccattcgcgcagcggacccgacgcaggaccacaatctagcttatggttatgtgcacaacgccttcagcgtcatctccgagctcaacgtctcggaccgcagcctctctgccgtccaggccctggcgggcatggcttgcattcttcagggcacaccggatcccgcgccggccgcaatgctcgttgccgccgctctacgactggcacaggccatgaaccttcacagggaatgttccagtccgggactcactgaggcagaagccgagaaacggaggcgggtgttttggaaggtgtatatacttgacaaggatatcagcctgcggacgggtcgaccttttggtcaagatgacgatgaaatggatgtacgtctgccatcaagctcaagctttgaggatggtaacctaggccttttcaactgtcggatagggcttgcgcttgtccaggggcaggtgtataaacaattgtattctgtacgggctggacggcaaacggcagcccagagagcaattgcggcacaggagttgagcactttgttatcatactggaagtccagcgcgcaatcctatctaccagaggactccacgacgttgtcagggctcccactttcaggcgagatgatccacaaggtggttctacgactcacatatctccattgcctcacaatgattgatcgacacttggccccgatggcgcagccttcctcctacctacagctcagcatgtcagagcggttgtcatcatcgcccccaggcagtctatgcgtcaccgagtcacgcaaagcgatccggctcgtcgaagccattcctcaaggagattgcgcctgtgtctggatgcttcttcacgctttcttcgctgcagccagcagcatgcttatcaacttgtcacggcatcctttgtcgccagacgcaacttcagatctcgatctcgtcgagccgtttctacgcttgttggagacactggccagggattcgagcacactctctcagtccgaggaattggcgcgaatgcgtcgcacttgtaatcgcctgaacttcgaagcaaaagaggctattcaccttttcagtacaatgcctccggcgaccctagcatga

SEQ ID NO: 19 - DNA, 1521 bp, Trichoderma reesei
atggccctcgcagctcaacagcatactcaggccgattggggccgctggtctcaccagattccacagagttttcccatgatgggctctccaggattcatgtcatacgatcccagagctcaggacggcagtcagatgcagcgtcaggtgtctgctcagtacctggtgaactcgaactacaaccagcccccgatgcccactgcttcgtctccccagtatcaacacgcagggccattttcctatgtgccttaccacagcccgccgccgtccactcctcttggttccccattcaagagcgaatttcccgagcaccctcttacgcgcatgacacactctacggtcgatcgacaccattctcaggccatgagggactaccaaccttattctcctgtatcgaggaggggatcgatttcttcagtcgccaccaagccctcagcagctcccgtcacaccaggtccaactactcctggctctttcacttcaagttccgacgcccagagccccagcactccaaacccccagactgcgtctcagcctgtcagctccaagactctcacttacaatgagaccgttcatccgggcgataggatcagcttcagaaccgatgttgatgaactcatgaaggccatccagaagacacagacgaccgacgagtgtcagcaaacactcacacctgcgcgaacaccaaagaactgtaccacaagtactcccgtacttcgtacacaaagcgggaagccgagaaaacagtgggtttgcgatggccccaactgcggcaaggcctttgtccagaagacgcatcgcgacattcaccgacgcactcacaccggccatcgaccatacgtctgcaccatggaaaattgcggtcttacgttctcgcagcgaggaaacctcaagactcacatacgacgccacacaggtgaaaagccgttctcttgcgctgcttgtggcaagtgcttcgctcagcgtgggaatcttcgatcccacgaggagacacacaaaggcctgaagcccttcgtctgccggctcgatgattgcaacaagtcgttttctcagctgggcaatatgaagactcatcagaacaactttcacaaagaaacgctccagaaactcacacacatgtttgtgcaattctcggagaacggcgaggtgcccagagactatcaggatcttttcgaatacttccagaagcactacaagaatagcaacaagggagtcaagggccgaggaaagactcgcgctgtggcagctcgtgggcctcaagattccgcgtttcggcaggctgcctccccagtgcccgcgttactgaagacgccggctacgactcatttgccccagatgacaatgccagcccatgatccccatggcagaatctcaccatacgccatgacccagggagctgcgaacactctgagcaatgtcctgcgcaaccccaacccctcttacggcctttatggacccacgtttgccccgggccctgtacgagatggcgtctttcacatgggcattgcgagccacctatcctga

SEQ ID NO: 20 - DNA, 2322 bp, Trichoderma reesei
atgaggcgacaaaatcacagctgtgaccagtgccgaaggtcgaaaagaggatgtgatgctccctccttggaagcaggacaacgcagctcgaatctgtggcaactgaataacggtaatagctctttcaagtgctcttactgcaacaagaccaacaagacttgcacatgggaatgggcaaaggctcagacactccaacgcgcgatcgcatatggatcgaagtcccctctgaaaggaatctccgggaggaggcatcctttaatggactactccattccgaacgacatcccctccttgcggactgaggtatcggaggatccaactacgacgtctgatctccccggcgatgccgacgctaccatttcctacactatagagccgcaattgtctgaatatccgcccgggagcgatgcaatctcgccggctcaatattgctacccactgcaagatgacggtctacggtcgctgaccaagaggcgacgactctcttccaatggcagtggctcgcaacgcacctctctatccagattttccgtcgaccaagaaatgatgtcacataccaatagccagctgatttcgacaaacctgctccagatataccacgatgtgcttgagcacaatctctcatgttggctgacggaaatcaacaatccattgacgactcagtcgcggcatggggatacagagaaccgtgcgggcctagtcagggaatggggaactgcatggtctaataggatatatacccgagccatccagctagaccgcgaatccatatcggcaaacttggtgcgcttgacgcctgcgcaagatgcttccgtcactaatgccctgcatcttgccatcatggcatttgctacgcagtgggcgcaaggaagccatcgacaaagagagcggtatcccacgacttccacctcctcgggtgatgaatcggatgggtttgccgaggagtttgatcgtagccttcagcaccagatatgggcccaggccaaaagggctctgcaggatgttgacgagctcgagtcctacagggtggcattggctgagctgatatttggattgacacagaaggcatggaatcatgaacctggagacagagaccttggaggaactacgaatattcgctctcgtggcgttggcttggaatccgaagtgaaggcacgactcggcgacatcatgtcaagagaggggccgcccatttacatggagagagctgctcggaaggttcaaacgctacaggctcgatataacgcaggcctgcgaggcattggatcctcggtggtaatcaacaatggagttgaagccgctggcaattcccagttcttctccagcaaggagaacaaagagaccgcaggactcctgtactggttcgccgtaatgtttgacacggtatcctcgtcgatgaacgaacggcccgtcgtcgtgcccgacgaagacatcccgcgctatacagacgaagatctccccgatacagcaacggaggatgacactcctccacaggggaggtgggatgttgggtcgtttgttcacgatgatgtggaaaaccctgcttataagcctacttggccatgcccgtacgaggacgccgccaaagctgttaccaaagccgcaccagtcaaagtcctgctgtttcgacatttatcgtatcttcagggaacactacgaagaggagcccgaggggaaagagtggaagatatcatcagctccaccctctctctctatcgttactggaacaagacatacggatcattctttagagagttgatgctcgatgtcgactctgtgccagagcgcataaggagctggttcttttgcatatcatgtcattggaacctcgctgcacttatgatagccgaccttgttgcatttgtcgacaacaacaacctcggaactgacatcgagacgcgggcacgtaccgagggtaggattgcatggaggatacgagatgcaagcactcaggagctctccgaacttgcagtcatttccatcccttgtcaaggattacacgacgattcaaattttcatcatgcggtcaacgaaggcaccattctgacggagccctggacaatgatcctcataagggctttcagcatggcatccgccatacttcttggggaggcagacgaagctcttcgccacggcgcggcgcagctgggatacacaggcgggcacttcgaagagacccttggaaaggtcatgaactgtatcaaggctttgtggcatctggggaagaagtcggacatggccagaaaagccgccgatttcctctctttgactacggacagactgcaggccgactacggaaccgggggtgtggtaatagggtga

SEQ ID NO: 21 - DNA, 1605 bp, Trichoderma reesei
atggacggcatgatgtctcaacccatgggacagcaggcgttctacttctacaaccacgagcacaagatgtcccctcgacaagtcatcttcgcacaacagatggccgcctaccagatgatgccctcgctgccgcccacgcccatgtactcgcgaccaaactcgtcctgctcgcagcccccgactttgtacagcaacggcccttcagtcatgactcccacaagcacaccccctctgtcctcgcgcaagcccatgctggtggacacggagtttggcgacaacccctacttcccctccacgccgcctctgtcggcctcgggcagcaccgtcggcagccccaaggcctgcgacatgctgcagacgcccatgaaccccatgttctccggcctcgagggcattgccatcaaggacagcatcgacgccaccgagagcctcgtcctggactgggccagcatcgcctcgccccccctgtcgcctgtgtatctccagtcccagaccagctcgggcaaggtgccctcgcttacctcgagcccgagcgacatgctctccaccacagcttcgtgcccttcgctgtctccctcgccaactccctacgcgcgctccgtcacgtcggagcacgatgttgacttctgcgatccccgcaacctgaccgtctctgttggctccaaccccaccctggccccggagtttaccctgctggccgacgacatcaagggcgagccgctgcccaccgctgcccagccgtcctttgacttcaaccctgcgctgcccagcggcctgccgacctttgaggacttctccgatctcgagtcggaagccgacttcagcagcctcgtcaacctcggcgagatcaaccccgtcgacatctcccgcccccgcgcctgcaccggctcctcggtcgtctccctgggccacggcagcttcattggcgacgaggacctgagcttcgacgacgaggccttccacttcccctccctgcccagcccgacctcgtccgtcgacttctgcgacgtccaccaggacaagagacagaagaaggaccgcaaggaggccaagcccgtcatgaactctgctgccggcggctcccagtccggcaacgagcaggctggcgccaccgaggccgcctctgccgcctccgactccaatgcctcctctgcctctgacgagccctcttcctccatgcccgcccctaccaaccgccgcggtcgcaagcagtcgctgaccgaggatccctcaaagacctttgtctgcgacctctgcaaccgccgcttccgtcgccaggagcacctcaagcgtcactaccgctccctgcacacccaggagaagccctttgagtgcaacgagtgcggcaagaagttctctcgcagcgacaacctggctcagcacgcccgcacccactctggtggtgccattgtcatgaacctcatcgaggagtcctccgaggtgcccgcctacgatggcagcatgatggccgggcccgtgggtgacgactacagcacctatggcaaggtcctgttccagatcgcctcagagatccccggaagcgccagcgagctctcctcagaagagggcgagcagggcaagaagaagcgcaagcgctccgattaa

SEQ ID NO: 22 - DNA, 1272 bp, Trichoderma reesei
atgaacatgacgacaacgctgccattggtgggtggacgtgaggagaagccgcagcagacgcagacgcaagcccagcaaccacgcaagaagcacgcgaagctattccacaagaagagtcggactggctgccaacgatgtcgaatccgtcgtgtcaagtgtgatgaagccaagcccatctgcaacaattgcacacgactggacctcgagtgcggctatgggcctcccgcaagctcccccgcgagcgaaggcgatgccgtcagtacctcgactgcattaagcgtcgaacacgatctggtcgattcgcatggcatcctttaccttcccgaaacagaagcccgtcgaaagctcgagctcgagctcttctaccactacgccacagaaacagccccgaccctgggcacagagaaatccgcccaagacttcattggcccagccctatgccgcgcggcactgcagtccgatgccgtcctctacggactctgcatgctgtcggcacttcacaaggcgtacaagtccaatttcagcgagccgcagcacatgcagcatcattccacatatctcaacctcaccctccagtcgcatcacaagcacgtggctcgcctagatatcgacaatgtggattattcctgcatggtctcgagtactcttcgcgtctatgcctacgtacagctgcagcggcgagagctggagccctatacgccacctatagagtggctgcgcatgtccaataccagcaccattgtgtttcgtaaagccctcgccttgattgagaagaaccccggctctctcagcggaaggttgacgcttgagatatctcaccatctggatgagaagcggaggctggagcactctgacgaactgctttaccttttgcgacgccaagagccacacgagctggaagaagagtgggatgacgacgtctaccacgtctacagacgcacgctcagctgcttcggctgggtctggaagcacagattcgtcagccctccaccccccggcatgtctcggagaatatatctcttccccatgatagtggacgcccagtttgtggattacgtggcgcagaggcggccacgagcgctggtggttctggctcattactttacgcttctggcgcttcaccgcgatttttggtatgtcggggatgctgggttccgtgaggtgagggcgatagcagccgaggtgccggctgaatggcagggcatgttagcacagccattggagttactggagaatccttccttgttgtgcaaaataccaagttatagatag

SEQ ID NO: 23 - DNA, 1902 bp, Trichoderma reesei
atgctcgacgagccagaaggagagactgcccccaaagatggccctcgcgacctgctcgaagagtttgccatcgagtctcactgcctggacgcgcccatgtcgatggaagacctggagcttctacgagcagacattgagtccgacaagtcgcctcgagactcattgtccgacatggtcgatacgtttaacctgcccaactatgtccgacccctgacgagcctccctcccgacgacatggagtttctgcacgccgagggcgccctgactctgcccgacagtgctctccagaacgcgctcctccgggcgttcttcgaatacgtgcatccgtatgtgccgacgctggatctcgatgctttcttgcactccatagagacacctgatggctccgcgggacaagtgagcttgttgctgctgcaggcggtcctcgcagctggaacggcacatgtagagctgcatcacctccggaatgccggctatcagacgcggaagcaggctcgcacggcgttcctcaaacgagttcgactcttgtacaagtacaactgcgagctggaccagatggtcctcacacaatcgctcctcctcatcacctcctggcaagacgcctccgacgagcacggcaagacgtggttctggatcgacgcggccgtctcgcacgccttcgcggccggcctgcacctggagccgtccgtcaacaagccgaacctgtcgaggcgcaagcagcggctgcggcggcgcgtctggtggtgctgcttcatccgcgaccggctgctgtcgctgggcatgaagcggccgccgcggatcaaggacggcgacttccaggtggcgatgctggacgaggccgacttccagccggagcagatccgcagcgacgacggcgaccacgcgcgcttcgaggccgtctgcgtctacgtccggagccgcaagaagcgcgccgagctggcgaggatgtgcgtggcgcaggcgacgctctgccggtccatgagcttcctgtcgagcagcatgtacgtggcgccccacgacagccttgctgtcccgtcgtcgtcgtcccaggaggccggggcgacgagggcgaggccgagggcagacgacggcggcgagcagaagctcttcacgacgtacatccgcgacctgctcgagtggcgcgacgggctgccggagggcgtctcgtaccggcccatctcgagcagcgacattggccgggacggcaacacgagcatctcgctggaccgggcggtgctgcacatgatttactacgcggcggtgctgtgcctgtaccgctcgcgcttcgtggcgctgcttcagcagcagcagcagcagcagcagcacggggcgggcgactcgtcgtcgtcgtcgtggtccatggagaaggagttgtgcaagacgtacatgcagcactcggcgaagcgcatcggcgacatcgcgaggaacatttacgaccacgggctggatcggctgctgcccagcatggcggccaacattgccgtgtccgccgcgagcgtgcacctgctcgagctcaggggccagctgcagggctgcgggacggagccgagctatcgccagagcaggcggctgatgcagtccatgcacgacatttacgcgggcgctgatttgtcgagggagtcgctcaagtggcacgaggaggaggagcaacagcagcagcaggagaggagagagaaggaggagaaggggatgagctggagtagccccggcggagaggtagcggctgagacaggggggaaggaggagaaggaggaggaggactatctcgtggctgacgcggactggctaaaggacttggaggcggcgacgtgctggtatgtggccgagccgtatcgggcggacagcttcttgcagtatccgggagagggactggatgtggtgaatgagttttttgctttctaa

SEQ ID NO: 24 - DNA, 804 bp, Trichoderma reesei
atggcgcctgttcccaccgcaggcgttgatttccgcgacctgctgcgctccggccagttctcggatctgaccgttgtctgccggggcatcgagttcaagctgcacaaggtcattgcgtgcctgcagtcgcccgtctttctcgcggctgtcaacagcgactttcaggagggccgcaccggcgtgataaaaatagaccagttcgatcccgagactgtgagacgcctggtcgagtttctctacacgggagactatggccgccagcctcaggagcctcagcccgtgcaggagcagactcaaggcaccgtgctgcatgtgcgtgtcaatgccatcgccgactactacggcgtcaaggccctcggccatctcgcgacccagaagatcaagcaggcgttccaggacaagtgggatccccagaccttcatgattactgccaaagaggccctcggcgccagcggcgacaagacgctgcacgacgccatggctcgcatcgcagccgaaaacatgacggacctggtcggatgccccgagctgactgatctcgttggtgactttgcggccgagatcatgcgtcaccaaggcaagaagcacgctgacctcgttgccatgcatctgcacgccgagctgggaactgcccgcgtcgtggcaaggttccgcaagatcattgaggaaatcaaccagagagagtactgccgcaacgccgcttgtgcagaggcctcctttggctgcaacatcgagcaggtcgataatcccgtcggcgagcccacctacattctccgctgttcctactgtcgatgcaggcattag

SEQ ID NO: 25 - protein, 498 aa, Trichoderma reesei
MAPPQAALDFVDFVNASPTPYHAVKSAAALFEKAGFTLIKERDSWASTLRPGGKYYLTRNGSSIVAFTIGRKWRPGNPVAIVGAHTDSPCLRVKPVSKKTNVGYIQVGVEKYGGGIWHSWFDRDLSLAGRVLVREGDNFVQKLVKVEKPILRIPTLAIHLHRQTNFDPNLEVEMLPIASLAAAELNKGKPTESKLEEPKDETMHDGEDEDFHPLEKMTVRHHPAMLDVVASEAGVDVASIVDFELVLYDTQKSVIGGINDEFIFSPRLDNLGMTYCSVEGLISSVSASDALDDDSTIRMTVCFDHEEIGSESAQGAHSNLLPAVLRRLSSLSLPTDAASDGSYEHVHHESDNPTAFEQTLSRSFLISADMAHAVHPNYVGKYESSHQPAINGGTVIKVNANQRYATNSPGIVLFQECARKANTRIQIFVVKNDSPCGSTIGPGLAAKLGIRTLDLGNPQLSMHSIRETGGTEDVGNAIKLFAQFFRSYGEIEPRILVD

SEQ ID NO: 26 - DNA, 1497 bp, Trichoderma reesei
atggcgcccccgcaagccgccctcgactttgtcgactttgtcaatgcctctcccaccccctaccacgccgtcaaatccgccgctgccctcttcgaaaaggccggcttcaccctgatcaaggagcgcgactcttgggcatcaaccctccggcccggcggcaaatactaccttacccgcaacggctcgtccatcgtcgcctttaccatcggccgcaagtggcgccctggcaaccccgtcgccattgtcggtgctcacacagactcgccctgcctcagggttaagcccgtgtccaaaaagaccaatgtcggatacatccaagtcggcgttgagaaatatggcggaggcatttggcactcttggttcgaccgcgacctgagtctcgctggtcgcgttctggtgcgtgaaggcgacaactttgttcaaaagctggtcaaggttgagaaacccatcctgcgcatcccgacgctggccatccacctgcaccgccagaccaactttgaccccaacctcgaagtcgaaatgctcccgattgcgagcctggctgccgccgaactgaacaagggcaaacccaccgagtccaagctcgaagagcccaaggacgagaccatgcatgatggcgaggacgaggacttccatcccctcgagaagatgacggtgcgccaccacccagccatgcttgatgtagtggctagtgaggccggcgtcgacgttgcctccattgtcgacttcgagctggtcctgtacgacacgcaaaagtccgtcatcggcggcatcaacgacgagttcatcttctcaccgcgcctcgacaacctgggtatgacgtactgctccgtggagggtctcatctcctccgtcagcgcctcagatgcccttgacgatgactcgacgatccgcatgaccgtctgctttgaccacgaggagattggctctgaatcagcacagggcgctcactcaaacctcctcccagcggttcttcgccgcctctcgtctctctctctcccgactgacgccgccagcgacgggagctacgagcacgtccaccacgaaagtgacaaccccacggcctttgagcagacgctgtcccgctccttcctcatctctgcggacatggctcatgctgttcatcccaactatgttggcaaatatgagtcaagccaccagccggctatcaacggcggaaccgtcatcaaggtcaacgcaaaccaacgctatgccaccaactctcccggcattgtcctgtttcaagaatgtgcccgcaaggccaacacgcgcatacagattttcgtagtaaaaaacgattcgccgtgcggatcgactataggtccgggcctggctgcgaagttgggaattcgcacactggacctcggcaatcctcagctgtcgatgcactcaattcgcgaaacgggaggcacggaggacgtgggcaacgccatcaagctctttgcacagttctttaggagttatggcgagattgagccgagaattctggtagactga

SEQ ID NO: 27 - protein, 513 aa, Trichoderma reesei
MAVLSRLALTASFALCGVSAAGIQQPLTAPESLPPSHEAVADYGSKPIIDSEALQSAISIDTLVKRAESFYKFAKASEEEYGHPTRVIGSAGHEQTLNYITNTLLDHGDYYNVSVQEFPVTLSNVFQFRLVLADEVSKSAIPMGLTPPTKDKEPVHGDLVLVQNSGCDASDYPQNVKGNIAFIRRGACSFGDKSIGAGKAGAKAAVIYNTDPEELHGTLGLPVEDHIATFGIDGVEGKKILAKLSNGESVDAIAYIDAEVKQIQTVNVLAQTEEGDPDNCVMLGGHSDGVAEGPGINDDGSGSISVLEVAVQLTKFKVNNCVRFAWWAAEEEGLLGSDFYAASLSDEENQKIRLFMDYDMMASPNFAYQIYNATNAESPAGSEELRNLYVDWYKSQGLNYTFIPFDGRSDYDGFIRAGIPAGGIATGAEAVKTKEEAEMFGGRAGEWLDPCYHQLCDDLGNLNHTAWEVNTKLIAHSVATYALSFDGFPKRKLETEMSAYSQTTKHHGPKLIL

SEQ ID NO: 28 - DNA, 1542 bp, Trichoderma reesei
atggccgtcctcagcagattggccctcacggcctcgttcgccctctgcggcgtctcggcagccggcatccagcagccgctgactgccccagagtcgctgcctccctcacacgaggccgtcgccgactacggctccaagccgatcattgattccgaggccctgcagagcgccatcagcatcgacacgctcgtgaagcgtgcggagagcttctacaagttcgcaaaggcctcggaggaggaatacggccatccgactcgagtcattggcagtgccggccacgagcagacgctcaactacatcacaaacaccctgctcgaccacggcgactactacaatgtctctgtccaggaattccccgtcacgctgtccaacgtcttccagttccgcctggtcttggccgatgaggtttccaagtcggccatccccatggggctgacgccgcccaccaaggacaaggagcccgtccacggcgacctggtgctcgtccaaaacagcggctgcgacgcgtccgactacccccagaacgtcaagggcaacattgcctttatccgccgaggagcctgctcctttggcgacaagtcgattggggccggcaaggctggtgccaaggctgccgtcatctacaacaccgacccggaggagcttcatggcacgctgggactgcccgttgaggaccacattgccacctttggcattgacggcgtcgagggcaagaagattctcgccaagctcagcaatggcgagtctgtcgatgccattgcctacatcgatgccgaggtcaagcagatccagacggtcaatgtcctggcccagacggaagagggcgatcccgacaactgcgtcatgctcggcggtcacagcgacggagttgccgagggccccggcatcaacgacgacggctccggcagtatatccgttctggaggtcgccgttcagctgaccaagttcaaggtgaacaactgcgtccgcttcgcctggtgggctgccgaggaggagggcctgctgggctccgacttttacgccgccagcctgtctgacgaggagaaccaaaagatccgcctcttcatggactatgacatgatggccagtcccaactttgcctaccagatctacaacgcaaccaacgccgagagccctgccggctccgaggagctgaggaacctctacgtggactggtacaagtcccagggcctcaactacaccttcattccctttgacggccgcagcgactacgacggcttcatccgcgctggcatccccgccggtggtattgctaccggcgccgaggctgtcaagaccaaggaggaggccgagatgtttggcggacgcgccggcgagtggcttgacccttgctaccaccagctgtgtgacgacctgggcaacctgaaccacaccgcctgggaggtcaacaccaaacttattgcccactcggttgccacctacgccctctcgtttgacggcttccccaagcgcaagctggagacggagatgagcgcctacagccagacgaccaagcaccacgggcccaagctgattctgtaa

SEQ ID NO: 29 - protein, 994 aa, Trichoderma reesei
MRLPNPFSFRPGPVTFWTTAVYLALVIPLIYVHETVPSAPSSHSLKQGLDLDEAWLDLQLMTRQYHPYNSRANTEVREFLIKRSHEILDRNGVPYRTEKTGGVIWDARANANANDELRAKRAPGATIFDDRISNVTWTVDSLLQSTKGGSKTWQGYYFEGDNFYIYIHGQEDPEGDWWTSQAGAASYSRSGGVLVNCHFDSVSTGYGATDDGMACVSMLQLLSYFTTEGQQPKHGIVLLFNNAEEDGLLGARAFGYSPLLKFCHTFVNLEGAGAGGRAMLFRTTDLEAAKAYSKSPHPFGSVVAANAFERGVIKSGTDFEVFAPDFGQRGVDIAFYQPRARYHTEDDDARHTSVRSIWHMLSAALATAERFSELTDTVFSGDRRDGDKDLVQNGKPTEGVYFDWYGSGWSAFPLRGLFAWSLTLLLVTPLVLIVVTYLLIRQDKYYFFAKDVELENSELHDDPIALGGWRGFFRYPLALIFAVGLTLGAVLLVAKVNPLIIYSSGYAVWAMTVSLFYISFFMIMRGANFVRPSALHRGFALIWLFILSWIVQVIAAVAEDRMHIGGLYFAAFFHTAVFVSLFISLVELFALPGKEDFANQFQDDAAPSHIRVTSSDNTITGHEDDQEDATETTPLRAREHSYGSSDHPTFASTYRRSAHLDDPAPSDLISFPPYEHEQAWSGRLPTWTWIVQFLLLAPIHIILVGNLALVQTSAMAMNGADGGSLLPPIMGVGIMTILLLLPLTPFMHRITRHVPQFLFVVFVATFIWNLAAFPFSNNARYKLYFQEVIDVDAGTNVATLTGIPEYLHKVIDSIPSATGQDVECRASTRLGLTTCEYDASSLPPYLANGTDPKDLITVSSSRSSDGTTANLKVDALDTKMCILNLTRPVFGFTINGGAPPDTRFGTIPRGGLRGITLFRREFEGPWDVDLQLTGEDDVLDEDELEVTVKCAYSDMNDDKTIPVLRELYQYMPKWAVISKTAVALVEVRKKFTIS

SEQ ID NO: 30 - DNA, 2985 bp, Trichoderma reesei
atgaggctccctaatccgttcagcttccggccggggcccgtcaccttctggaccacggccgtctacctcgccctcgtcataccgctgatctacgtccacgaaacggtgccgtctgcgccatcgagccactctctcaagcagggcctggatctggacgaggcgtggctcgatttacagctcatgacgagacagtaccacccgtacaacagccgagcaaacacagaagtccgcgagttcctcatcaagcgctctcacgaaatcctcgaccggaatggcgttccttacagaaccgaaaagactggaggagtgatttgggatgccagggccaatgccaatgccaatgacgagctgagagccaagcgagcgcccggtgccaccatcttcgatgaccgcatctccaacgtgacctggaccgtcgattcgctgctccagagcacaaagggcggctccaagacgtggcagggctactactttgagggagacaacttttacatctacatccacggccaggaagatcccgagggcgactggtggacctcgcaggccggagcagccagctacagcagatccggaggtgtccttgtcaattgtcattttgactccgtctcgactggatacggcgccaccgacgatggcatggcctgcgtgagcatgctccagctcttgagctacttcaccaccgagggacagcagccgaaacacggcatcgtgctgctctttaacaatgccgaggaagacggcctgctgggcgcccgcgcgttcggttacagcccgctgctcaagttctgccacacctttgtcaacctggagggagccggcgctggcggccgtgccatgcttttccgaaccacggatctcgaggctgccaaggcctactccaagagccctcacccctttggatccgtcgtcgcggccaacgcgtttgagcgtggagtcatcaagagcgggaccgactttgaagtgtttgcccctgactttggacagcgcggcgtggacattgccttttaccagccgcgagcacgctaccataccgaggacgacgatgcgcgccacacttcggtccgcagcatctggcacatgctgtcagccgctctggcgactgcggagagattctcagagctcaccgacacagtcttcagcggcgatcggcgcgacggcgacaaggacttggtgcagaacggcaagccaaccgagggtgtctactttgactggtatggcagcggctggtcggcgtttccgcttcgaggcctctttgcgtggtccctcactctgctcctagtcacgcctctggtcttgatcgtcgtcacctatctgctgatacgtcaggacaagtactacttcttcgccaaggacgtggagctcgagaactctgagctccatgacgacccgattgctcttggtggttggcgcggcttcttccggtatcctctagccctcatctttgccgtgggcctgacattgggagcggtcttgctggtcgccaaggtcaatccactcatcatctacagcagcggatatgcagtctgggccatgaccgtgtctttattctacatctccttcttcatgatcatgagaggtgccaactttgtcagaccgtccgccctgcaccgcggatttgccctcatctggctgtttattctctcgtggattgtgcaggtcattgctgccgtggctgaggatcgcatgcacattggcggcctctactttgccgccttcttccacacagccgtctttgtgtcgctcttcatctcgctggtcgagctgtttgctctgcctggaaaggaagatttcgccaatcagttccaagacgacgcggcaccgtcacatatccgggtcaccagctccgacaacacaattaccggccacgaagacgaccaagaggacgctacagagacgacgccgctgagggctcgagagcacagctacggatcgagcgaccacccgacgtttgccagcacgtatcgacggtcggctcatctggacgaccctgccccctcggacttgatcagcttcccgccgtacgagcacgagcaggcgtggtctgggcggctgccgacgtggacctggattgttcagttcctgttgcttgcccccatccacatcatcctcgtgggcaatctggcattggtgcagacttccgcaatggccatgaacggcgccgacggcggcagtctcttgcctcccatcatgggcgttgggatcatgaccatcctcctgctgctccctctgacccctttcatgcaccgcatcactcgccacgtgccgcaattcctgttcgtcgtcttcgtcgccacgttcatctggaacctagctgcttttcccttttcaaacaatgcccgctacaagctgtacttccaggaggttatcgatgtagatgcgggaacaaatgtggctactctgactggtatcccagaatatctccacaaagtcattgactctatcccgtctgccacgggccaagatgttgaatgcagggcttccacgcgtttaggcctcactacgtgcgaatacgatgcgtcatctctgccgccgtatctcgccaacggcacagaccccaaggacctgattaccgtgtcgagctcgaggtcatccgacggaacgacggcgaatctcaaggtcgacgccttggacaccaagatgtgtatcctgaaccttactcggcctgtgtttgggtttaccattaatggcggcgcccccccggacacgcgatttgggacgatcccgcgtggcggtctgcgggggatcaccctcttcagacgagaattcgaagggccatgggacgttgacctgcagctgacgggggaggacgacgtgctggacgaggacgagctggaggtgacggtcaagtgcgcgtacagcgacatgaacgacgacaagacgataccggtgctgcgcgagctgtaccagtacatgccaaagtgggccgtcatcagcaagacggcggttgcccttgtcgaagtcaggaagaagtttacgatatcatga

SEQ ID NO: 31 - protein, 491 aa, Trichoderma reesei
MKLWSSLALAGIVATRAVATEVLSPDAIEKDIEEKNLQNVLWNLNHIAENNGGNRAFGLPGYNASLDFVLERVQTRFASEFDTYVQKFTHLFESTRSISVTGPEGENVYVITLQYNTATPLPGGITAELIDTPVDDARGSACFEDQWAGIDATGKIALVRRGVCAIADKLKLAKAHGALAVILYNNVPGDSIGGATLSANNIGLLVPVGVITEEYGKGWKARLAQGEVLKATLVVDSINEPRDSWNIIAETKEGDPNNVVMLGAHLDSVQAGAGVNDDGSGTAGLLELATAFRRYKGFANKVRFAWWGAEESGLIGSLYYGSQLSEAEADRIRFYFNYDMIGSKQPIYAVYADTDAHKSGGSILFDYLQSKGKPVYYGGFGSSSDYVAFLELGIPSSGIFTGAGAPEDACYHQACDNLDNINWEAITLNTKAAGRAAAQLALSLDGIPPREKTSPNPSSRRAIERRLNRAAQLTKVIEKSHSCGGLGDHTV

SEQ ID NO: 32 - DNA, 1476 bp, Trichoderma reesei
atgaagctctggagtagcctggccttggccggcattgtggctactcgtgccgttgccaccgaggtgctctcaccggatgcgatcgagaaagatatagaagagaaaaacctccagaatgtgctctggaacctgaaccacatcgccgagaacaatggcggcaacagagcctttggtctccccggctacaacgcctccctcgactttgtcctggagcgcgtccagacacgcttcgccagcgagttcgacacgtatgtgcaaaagttcacccaccttttcgaaagcacgaggagcatctccgtcaccggacccgagggcgagaatgtctatgtcattacccttcagtacaacacggccacgcctcttcccggcggcatcacggccgagctcattgatacgccggttgacgacgcgcggggatctgcgtgcttcgaagaccaatgggcaggcatcgatgccacgggtaagattgccctggtgcggcgcggcgtgtgtgctatcgccgacaagctcaagctggccaaggctcacggtgcgctggccgtcatcttgtacaacaacgtgccaggtgactccattggaggagcgaccctgagtgccaacaacattggactgctggtccctgtcggagtcattaccgaggagtacggaaagggctggaaagctcgtctggcgcagggcgaggtgctcaaggccactcttgtcgtggattcgatcaacgagcccagagacagctggaacatcatcgcggagaccaaggagggcgacccgaacaatgtggtcatgcttggtgctcacctagactccgtccaagctggtgctggtgtgaacgacgatggcagcggaacagccggccttcttgaactggccaccgcctttaggagatacaagggcttcgccaacaaggttcgatttgcctggtggggggcggaagagagtggcctcatcggctcgctgtactatggcagtcaactgtctgaagcggaggctgatcgcatccgcttctacttcaactacgacatgattggctccaagcagcccatctacgccgtctatgctgatacagacgcccacaagtctggaggctccatcttgtttgactacctgcagtccaagggcaagccagtttactatggcggatttggatcctcttcggattatgttgcctttttggagcttggcataccctcttctggaattttcaccggtgctggtgctccagaggacgcgtgctaccaccaggcctgtgacaacctcgacaacatcaactgggaggccatcactctcaacaccaaggctgctggtcgtgcggcggcacagctcgccttgagcctggatggcatccctcctcgagagaagacgagccccaaccccagcagcagacgggccattgagagacggctcaaccgggcggcccagctcaccaaggtgattgagaagtctcacagctgcggaggcttgggtgaccacactgtatga

SEQ ID NO: 33 - protein, 369 aa, Trichoderma reesei
MVTKTAIALLAAVFPLALSVPLTGSKSELRLVKTSEDDAGQWVTEQEKFDRFTSKNIGFIDITDIKDEEVLSILSKPTYDTSLAARAVVYPSSVSHVDEANALIANVSTAGPQSWLTTFTGFTTRHYRSTTGTQASAWLFDQVSSIAAARPEITVQRFAHTWNQPSIIARLPGRTSSLIIVGAHLDSTAGSTTARSPGADDNGSGSVTILEALRVITQSDFTPKNTIEFHWYAGEEGGLLGSQAIFANYKSTQKTVLAMLNQDMTGFSPSNQLAVYTDYVDAALTQYVRVIATQYTGAAPLTTRCGYGCSDHASARSNGFPSAFVNEDTFERSNPNIHSAADSLEKIQWPAILRHAKFTVGFLVEASYL

SEQ ID NO: 34 - DNA, 1110 bp, Trichoderma reesei
atggtaaccaaaaccgccatcgctctgctcgcagcggttttcccgcttgctctttctgtgcctcttaccggaagcaaatcggagcttcgcctcgtcaagacatctgaggatgacgccggacaatgggtgactgagcaagagaaattcgacagattcacctccaagaacattgggttcattgacatcaccgatataaaagatgaggaagtgttgtccattttgtcaaagccaacttatgatacatctctcgccgctcgtgctgtcgtatacccaagcagtgtctcgcatgtggacgaagcgaatgcactcattgcaaatgtatctacagctggcccgcaatcttggttgacaacattcactgggttcactacgcgccattatcgctcgactactggcacgcaggcatcggcttggctgttcgaccaagtctccagcatcgctgccgcaaggcccgagattactgtgcagaggttcgcccatacgtggaaccaaccttcaattattgctcgcctgcctggacggacgtccagtctcatcattgtcggtgctcatcttgactccaccgccggctcaacgacagcccgcagtccaggcgcggatgacaatggctctggatctgtcaccatcctagaagccctccgtgtgattacccaatcggatttcacccccaagaacacgattgagttccattggtacgccggcgaggagggaggccttctcggttcccaggccatctttgccaactacaagtccactcagaagactgtccttgccatgctcaatcaagacatgactggcttctcgccgagcaaccagctggccgtgtatactgactacgtcgatgcagctctgacacagtatgtcagagtcattgctactcagtacacgggagccgcgcctcttaccacacgatgcggctacgggtgctccgaccacgcaagtgctcgatcaaatggattcccatctgcttttgtcaacgaggacacatttgagaggtccaatcccaacatccatagcgctgcagactctcttgagaagatacagtggccagctatccttcgccatgccaaattcacggttggatttcttgtggaggcatcatatctttga

SEQ ID NO: 35 - protein, 419 aa, Trichoderma reesei
MKCLALLSAFLASASAAAVQPHRVSYNGYKVFRVSVEESNIGRINDVVDRLNLQTWKPAKKAGSFADIVVHPDQLEAFQQETQDLKPVVMHEDLGLSIEAESSSQNFAINAVNSTWFNSYHAYADHLQWLRDLSAQFPNTSEIVTSGNSLNGNPITGIHFWGSSGKGKKPAVILHGTVHAREWITTLVVEYFAYTLLTSTDATTKGLLDKYDFYFFPVVNVDGFLYTQSTDRLWRKNRQTNSGSSCIGRDINRNWNYMWNVPGGASTNPCAEDYKGAAAGDSVEFKALSAFIQKIKTAQGVKLYIDYHSYSQLFMTPYGYSCTAVAPNNSELQSLAKGAVAAIRAVHGTSFDYGPICSTIYQATGSSVDYVSDVIKADYTFTSELRDTGRYGFVLPADQILPSGEEAYAGFKYLLQNMK

SEQ ID NO: 36 - DNA, 1260 bp, Trichoderma reesei
atgaagtgcctcgctctgctatcggcctttcttgcatcggcatcagctgccgctgttcagcctcaccgagtctcctacaatggatacaaggtcttccgagtgtctgtcgaggagagcaacattggccgcatcaacgatgtcgtggacaggctgaacctccagacctggaagccagccaagaaggcagggtccttcgcagacatcgtagtccaccccgaccagctcgaggctttccaacaggagacgcaagacttgaagcccgtcgtcatgcacgaagatcttggcctctctatcgaagctgagtcttcttcccagaactttgctatcaatgccgtcaacagcacgtggttcaactcctaccacgcctatgcagaccatctgcagtggctccgagatctttctgctcagttccccaacacctccgagattgtcacctctggcaactcgctaaacggaaatcccattaccggcattcacttttggggcagctccggtaagggcaagaagcctgccgtcatcctgcacggaacggttcacgccagagaatggatcacgacgttggttgtcgagtatttcgcctacacgctgctcacgagcactgatgctacgaccaagggccttctggacaaatatgacttttacttcttccccgtggtcaacgtagacggattcctgtatacccagagcaccgatcgcttgtggcgaaagaaccgtcagaccaactctggcagctcgtgcatcggtcgcgacatcaaccgcaactggaactatatgtggaatgtccctggaggcgcctctaccaacccctgtgccgaggactacaaaggcgctgctgcgggcgattccgtcgagttcaaggccctctctgcctttattcagaagatcaagacggcccaaggtgtcaagctctacattgactaccactcctactctcaactcttcatgactccgtatggatattcttgcactgccgtcgcgccgaacaacagtgagctgcagtcactcgccaagggcgccgttgctgccattcgtgcagtccacggcacctcttttgattacggcccgatctgctcgactatctatcaagccaccggctccagcgttgactatgtgagcgacgtgatcaaggcggattacacctttacgtctgagctccgagacacgggtcgatatggctttgtcctccctgcagaccagattctgccgagcggcgaggaggcatacgcaggcttcaagtacttgttgcagaacatgaagtga

SEQ ID NO: 37 - protein, 442 aa, Trichoderma reesei
MKTFIPVALLALSQATSACLLPHERDEASGLKPVVRRQSSNGTPIGTGDRFSGGSTAPRGLGTQSSSTSFSTILNVKEVTSGLQGLANTYGVQTFNTPYKTAQGATVVGAKVGGTGGNCTDAYRVFFNGNIHARERGSADSVLYFISDLLYANAHNTGLTYGSKTYSNAQVKTALAAGIVFIPLSNPDGVAYDQSTNSCWRKNRNPNSGQSPGVDLNRNFDFLWDFRNLFASSAQSSVGSTSPSSETYHGASAFSEPETKNIKWVFDTYSKVRWFVDLHSYAGDVLWNWGSDENQVDYPTMNFLNGTYNKVRGILTDTPSPGRGYGEYVPQADLDVKEAAAKRVASALTAGGGRSYTAFQSAQLYPTSGASDDYAYSRHFSDPTKNLIHSYTIEFGFANNAASCPFYPSVSQYNSNLRATSAGFMELLLAATDYGLGDATTC

SEQ ID NO: 38 - DNA, 1329 bp, Trichoderma reesei
atgaagacctttatccccgttgcgcttcttgcgctctcccaagccacctcggcgtgtcttcttccccatgagcgagacgaggcgagtggcctgaagccagtcgtccgccgccagtccagcaacggaactcccatcggcaccggcgacagatttagcggtggctcaactgcgcctcgaggactgggaactcagtcctcatccacctccttcagcacaattctcaacgtcaaggaggtcaccagcggtctgcagggcctggccaacacgtacggagttcaaactttcaacactccttacaagacggcccagggcgcaaccgtcgtcggagccaaggtcggcggtaccggaggtaactgtaccgatgcctaccgcgtcttcttcaacggcaacatccacgcccgagagcgcggctccgcagacagtgtgctctacttcatctcggatctgctgtatgccaacgcccacaacaccggcctcacctacggctccaagacgtacagcaacgcccaggtgaagacggcgctggccgcgggaatcgtcttcatcccgctcagcaaccccgacggcgtggcctatgaccagtccaccaacagctgctggcgaaagaaccgcaaccccaactcgggccagtcccccggagtcgacctgaaccggaactttgacttcctctgggacttccgcaacctcttcgcctcgtcggcacagtccagcgttggctcgacctctcctagctccgagacgtaccacggtgccagcgccttctctgagcccgagaccaagaacatcaagtgggtgttcgacacgtactccaaagtccgctggttcgtggaccttcactcgtatgccggtgacgtcctgtggaactggggcagcgatgagaaccaggtcgactacccgaccatgaacttcctcaatggcacctacaacaaggtccgcggaatcctgaccgacacgccgtctcccggccgaggctacggcgagtatgtcccccaggcggacctggacgttaaggaggccgcggccaagcgcgtggcctcagctctgactgctggcggcggccgctcttacacggcctttcagtcggcgcagctgtatcccacctcgggcgcgagtgatgactacgcttactcgaggcacttttccgatcctaccaagaatctcatccactcttacacgattgagtttggctttgccaacaacgccgcgtcttgccccttttatccctctgtttcccagtacaactcgaacctcagggctaccagtgctggtttcatggagctgctgttggcagccaccgactacggccttggagatgcaacgacgtgttag

SEQ ID NO: 39 - protein, 884 aa, Trichoderma reesei
MADRDVLPDNIKPSHYVLSLRDLDFKAWTYKGTVTIQSEVVKPTKELVVNALELKLLNAKVTLDHTKSEQSWQSSNVSYDAKAQRATVAFDAEIPVASKASVVIEFEGIINNEMAGFYRSKYKPAATPAASVPRDDEWHYMLSTQFESCDARRAFPCFDEPNLKATYDFEIEIPVDQVALSNMPVKETKPTKEGWHLVSFETSPLMSSYLLAWAVGDFEYIEQLTDRKYNGKQIPVRVYTTRGLKEQGRWALEHAPKIIDYFSEIFDIDYPLPKSDLLAVHEFTHGAMENWGLVTYRTTQVLFDEKTSDARFKNAVAYVVAHELAHQWFGNLVTMDWWDELWLNEGFATWVGWHAVDHLHPDWQVWAQFVSEGMENAFRLDGIRASHPIHVPVRDALDVNQIFDHISYLKGCSAIRMLANHLGVETFLKGVSNYLKAHAYGNAKTKALWDALAEASGKDINQIMHPWISKIGHPVLTVSEEPGKLAIKQSRFLSTGDVKPEDDTTTWWVPLGLAGKKGEPGVSALSLTKKEDIIDDIDTDFYKLNSGATGFYRVAYPPARLAKLSSQLDKLSTEDKIAIIGSTADLAFAGNSSASALLTFLQGFQKEEHPLVWSQILGCIGDLKSVFGEDKEIKKGLNNFAVKLMDEKVKQVGWEFPEGENYLGGILRKDLIAAAVAADHPEVKAEAIKRFNAWVENPEANAIHPSLRGAVWRAGLDDNAAKNVEVLKKEWFTTKSIDGKLIALAALSTVDDADIVKNNLIPFNFNTAPPHNAVPAADMHVLGGNLAAHPVGRTLQWEFLKSNWELAVAKLGNPIVVDRFIGLSLKTFTDAAVLDDIEQFFKDKDTHSFDRTLETAKDRIRGRAAYKKRDSEALKQWLSENGYF

SEQ ID NO: 40 - DNA, 2655 bp, Trichoderma reesei
atggccgaccgcgacgtcctccccgacaacatcaagccctcgcactacgtcctgtcgctgcgcgatctcgacttcaaggcgtggacctacaagggcactgtgaccatccagtccgaagtcgtcaagcccaccaaggaactcgtcgtcaacgctctcgagctcaagctgctcaacgcaaaggtcaccctcgaccacacaaagtccgagcagtcatggcagtcgtccaacgtctcgtacgacgcaaaggcccagcgcgccaccgtcgcctttgacgccgagatccccgtcgccagcaaggcctcggtcgtcatcgagttcgagggcatcatcaacaacgagatggccggcttctaccgcagcaagtacaagcccgccgccaccccggccgcctcggtcccccgcgacgacgagtggcactacatgctcagcacccagtttgagtcgtgcgacgcccgccgggccttcccctgcttcgacgagcccaacctcaaggccacctacgactttgagattgagatccccgtcgaccaggtcgccctgagcaacatgcccgtcaaggagaccaagcccaccaaggagggctggcacctcgtgtcctttgagacctcgcccctcatgagctcctacctcctggcctgggctgtcggcgactttgagtacattgagcagctgaccgaccgcaagtacaacggcaagcagatccccgtccgcgtctacaccacccgcggcctcaaggagcagggccgctgggctctcgagcacgcccccaagatcattgactacttctccgagatcttcgacattgactaccccctgcccaagtcggacctgctcgccgtccacgagttcacgcacggcgccatggagaactggggcctcgtcacctaccgcaccacccaggtgctctttgacgagaagacgtcggatgcccggttcaagaacgccgtcgcctacgtcgttgcccacgagctcgctcaccagtggttcggcaacctcgtgaccatggactggtgggatgagctgtggcttaacgagggcttcgctacctgggttggatggcacgccgtcgaccacctgcaccctgactggcaggtctgggcccagttcgtcagcgagggcatggagaacgctttccgcctcgacggcatccgcgccagccaccccatccacgtccccgtccgcgacgccctcgacgtcaaccagatcttcgaccacatcagctacctcaagggatgctctgccatccgcatgctcgccaaccacctcggcgtcgagaccttcctcaagggcgtctccaactacctcaaggcccacgcctacggcaacgccaagaccaaggctctctgggatgccctggccgaggcttccggcaaggacattaaccagatcatgcacccctggatctccaagattggccacccggtcctgaccgtttccgaggagcccggcaagctggccatcaagcagtcccgattcctgtctaccggcgacgtcaagcccgaggacgacaccaccacctggtgggttcccctgggcctggctggcaagaagggcgagcctggcgtttctgccctgtccctgaccaagaaggaggacatcattgacgacatcgacaccgacttctacaagctcaacagcggcgcgaccggcttctaccgtgtcgcctatcccccggcccgcctggccaagctgagcagccagctcgacaagctcagcaccgaggacaagattgccattatcggctcgacggcggatctcgcctttgccggcaacagctccgcctcggccctgctgacctttttgcagggcttccagaaggaggagcaccctcttgtctggagccagatcctgggctgcatcggcgacctcaagtccgtctttggggaggacaaggaaattaagaagggtctcaacaactttgccgtcaagctgatggacgaaaaggtgaagcaggttggctgggagttccccgagggcgagaactaccttggcggcattctccgcaaggacctcattgccgccgctgtcgctgcggatcatcccgaagtcaaggcagaggccatcaagcgattcaacgcttgggtcgagaacccggaagccaacgccatccacccgtctctccgaggcgccgtctggcgcgccggcctggacgacaacgcggccaagaacgtcgaggtgctcaagaaggagtggttcaccaccaagtccattgacggcaagctcattgccctggccgccctgtcgaccgtcgacgacgccgacattgtcaagaacaacctcatccccttcaacttcaacacggctcccccccacaacgccgtcccggccgccgacatgcacgtcctcggcggcaacctagccgcccaccccgtcggccgcaccctgcagtgggagtttttgaagagcaactgggagctcgccgtggccaagctgggcaaccccattgtcgtcgaccgcttcatcggcctgagcctcaagacgttcaccgacgccgccgtgctggacgacattgagcagttcttcaaggacaaggacactcacagctttgaccggacgctggagacggccaaggacaggatcagggggcgggctgcgtacaagaagcgcgattccgaggcgctcaagcagtggctgtcggagaatggatacttttga

SEQ ID NO: 41 - protein, 407 aa, Trichoderma reesei
MQTFGAFLVSFLAASGLAAALPTEGQKTASVEVQYNKNYVPHGPTALFKAKRKYGAPISDNLKSLVAARQAKQALAKRQTGSAPNHPSDSADSEYITSVSIGTPAQVLPLDFDTGSSDLWVFSSETPKSSATGHAIYTPSKSSTSKKVSGASWSISYGDGSSSSGDVYTDKVTIGGFSVNTQGVESATRVSTEFVQDTVISGLVGLAFDSGNQVRPHPQKTWFSNAASSLAEPLFTADLRHGQNGSYNFGYIDTSVAKGPVAYTPVDNSQGFWEFTASGYSVGGGKLNRNSIDGIADTGTTLLLLDDNVVDAYYANVQSAQYDNQQEGVVFDCDEDLPSFSFGVGSSTITIPGDLLNLTPLEEGSSTCFGGLQSSSGIGINIFGDVALKAALVVFDLGNERLGWAQK

SEQ ID NO: 42 - DNA, 1224 bp, Trichoderma reesei
atgcagacctttggagcttttctcgtttccttcctcgccgccagcggcctggccgcggccctccccaccgagggtcagaagacggcttccgtcgaggtccagtacaacaagaactacgtcccccacggccctactgctctcttcaaggccaagagaaagtatggcgctcccatcagcgacaacctgaagtctctcgtggctgccaggcaggccaagcaggctctcgccaagcgccagaccggctcggcgcccaaccaccccagtgacagcgccgattcggagtacatcacctccgtctccatcggcactccggctcaggtcctccccctggactttgacaccggctcctccgacctgtgggtctttagctccgagacgcccaagtcttcggccaccggccacgccatctacacgccctccaagtcgtccacctccaagaaggtgtctggcgccagctggtccatcagctacggcgacggcagcagctccagcggcgatgtctacaccgacaaggtcaccatcggaggcttcagcgtcaacacccagggcgtcgagtctgccacccgcgtgtccaccgagttcgtccaggacacggtcatctctggcctcgtcggccttgcctttgacagcggcaaccaggtcaggccgcacccgcagaagacgtggttctccaacgccgccagcagcctggctgagccccttttcactgccgacctgaggcacggacagaacggcagctacaactttggctacatcgacaccagcgtcgccaagggccccgttgcctacacccccgttgacaacagccagggcttctgggagttcactgcctcgggctactctgtcggcggcggcaagctcaaccgcaactccatcgacggcattgccgacaccggcaccaccctgctcctcctcgacgacaacgtcgtcgatgcctactacgccaacgtccagtcggcccagtacgacaaccagcaggagggtgtcgtcttcgactgcgacgaggacctcccttcgttcagcttcggtgttggaagctccaccatcaccatccctggcgatctgctgaacctgactcccctcgaggagggcagctccacctgcttcggtggcctccagagcagctccggcattggcatcaacatctttggtgacgttgccctcaaggctgccctggttgtctttgacctcggcaacgagcgcctgggctgggctcagaaataa

SEQ ID NO: 43 - protein, 849 aa, Trichoderma reesei
MRRDVLAIAAVAGLVYANDPAPVAFDAGEWLGIDGNWSTIKVLLGSNSDLVNVLMSTSLSEFWAVGPGGCLKKEPHCTAARGGIYTPFASKHWSYMGIWQLGLEYLGYGGNGQYGLDTVNAYSKITDIGFGMSNVLMSAINTTDYYLGYFGLGITQGNFGREVAQSPLTQAVHTFGWIPSYSYGFTAGASYRNTPVSITLGGHDTARYVPHDIDFTLTPQDNMPRALIRGIEASAKKANKPKKWASETASLSGWDNSFTALIDSTTPYLWLPSAVCDRFADAFNLTYNATFDLYTLTNEQFNQYGSADSFTFTFSFSSFDNNDNFGSPLNVPGLVNITVPMRAFVGLLQYPFMHRTIKYGDPAVPYFALRKSHNDSAIVIGRSFLQEAYIITKYDEAVFSIHQAKFPEQPVAEANLVPIKQPNNSPYPSPPKQTGNRLSTGQMVGIVVGGILLCSFCLIILCCVCRRRKSPEKGDDATITETKDGASTLIPDTPRIPRPTLFLKFTRRKRFESEASKVTSPVSPLCIEAPDSEIYELPAPMPPVELDASDGEDVSSILIGETVLGTETTGSLSAYEMARRKMDRQLQGPVPEYSPPLLDTALPQEKAMAEASGVRATSGREAVPVSPIKAESGTGSLPASLPSPISSGYDSHPDTMPYPGAGFAAAQDSSGSSRSPYEQAAKAHFQLVNSRSNSRRSMSPAASNLDQNSDSPVACQKTPIDPTNIVCLGNLPDNLKTLRHSIMLAHIVSQENRDSFDSFTPRFKAEFHLSEQSLGSNYTEEEDRMMQEMTMQEMTMQAASSLGQSHEDSPSDGLSRDRRETYNSTQEMKNGNDIVHVPQLAEKRYSWED

SEQ ID NO: 44 - DNA, 2550 bp, Trichoderma reesei
atgcgtcgtgatgtcctagcgattgcagcagtagccggccttgtctatgcgaatgacccggcccctgtggcgttcgacgccggagaatggcttgggattgacggcaactggtctacaatcaaggtcttgctaggatcgaactcggatcttgtcaatgttcttatgagcacgtcgctttcggagttttgggccgttggacctgggggatgtttaaaaaaggaaccgcattgcactgcggcccgcgggggcatttacacgccatttgcatccaagcattggtcgtacatgggcatctggcaactcggcttggagtacttgggttatggcggaaatggccagtatggactcgacactgtcaatgcgtacagcaagattaccgatatcggtttcggcatgtccaatgtcctcatgtcagccatcaacacgacagactactacctgggctactttggcctcggcatcacacagggcaactttggccgcgaagtagcccaatcgcctttgacgcaagccgttcacacttttgggtggattcctagctacagttatggcttcactgctggcgcctcctaccgaaacacgccggtatcgatcaccttgggcggccatgacaccgcaagatacgttccccacgatatcgacttcacactaactccgcaggacaacatgccacgggctttgatcagaggcatcgaagcttctgccaagaaggccaacaagccaaagaaatgggcctccgaaacggcgagtctttcgggctgggacaactcgtttacggccttgattgacagcaccaccccatacctgtggctgccgagcgccgtgtgtgacagatttgcagacgccttcaacctgacgtataatgcgacgttcgacttatacacccttacgaatgagcaattcaaccagtatggctctgccgattccttcaccttcacctttagcttttcgagcttcgataacaatgacaacttcggatctccccttaacgtaccgggcttggtgaacatcacggtgccaatgcgagcatttgttggccttttgcaatacccgtttatgcatcgcaccatcaaatacggagacccagctgtaccttactttgcattgcgaaaatcccacaacgattcggctattgtcattggccggtcctttctacaggaggcgtacatcatcactaaatatgacgaggccgtgttttcgatccatcaggccaagttccccgagcagccggtagcagaggcgaacctagtaccaatcaagcagccgaataacagcccttacccgtcacccccaaaacagacgggcaacaggttgagcacgggacaaatggttggcattgttgttggtggcattctattgtgctctttctgcctcatcatcctctgctgtgtctgccgccgccgaaagtcgccggagaaaggcgacgatgccaccatcacggaaacgaaggacggcgcatctacacttatacccgatacaccgaggatacctcggcctaccttattcctgaagttcacacggcgcaaaaggtttgagagtgaggcgagcaaggtcacctcgccagttagccctctctgtatagaggctccagattcggaaatctacgagcttccggccccgatgcctcccgtcgaattggatgctagcgatggagaagatgtctcttcgatactgataggcgaaacagtcctgggcaccgagacaacgggtagtctcagtgcgtatgagatggctaggaggaagatggaccggcaacttcaaggccctgtgcccgagtactcaccaccgctgctggatacagccctgcctcaggagaaggcgatggcagaagccagcggagtacgcgcaacttcaggtagggaagcagtccctgtgtctccaatcaaagcagagtcgggaactggctcgcttccggcatcgctaccctcaccgatctcttcgggctacgatagccatccggatactatgccgtatccaggtgctggttttgcagcggctcaagactctagtggtagctcaagaagcccatatgagcaggctgcaaaggctcattttcaactggtaaatagccgatcaaactcgaggcgttcaatgagtccagcagcgtcaaatctcgaccagaactctgattctcccgtggcatgccaaaagaccccgatcgacccaacaaacatcgtctgcttggggaacctccccgacaatctcaaaacgctaagacacagcatcatgttagcgcatattgtcagccaggagaatcgtgacagctttgatagcttcacgcctcgtttcaaagccgaattccatctctccgagcagagtttgggaagcaactatacggaggaagaagatcgaatgatgcaggagatgacgatgcaggagatgacgatgcaggctgcctcttctcttggccagtcacatgaagattcaccatctgacggactatcaagagaccgaagagagacttataattcgactcaggagatgaagaacggcaacgatattgtccacgttccccagctggcggaaaagcgatacagctgggaagactga

SEQ ID NO: 45 - protein, 761 aa, Trichoderma reesei
MRSTLYGLAALPLAAQALEFIDDTVAQQNGIMRYTLTTTKGATSKHLHRRQDSADLMSQQTGYFYSIQLEIGTPPQAVSVNFDTGSSELWVNPVCSKATDPAFCKTFGQYNHSTTFVDAKAPGGIKYGTGFVDFNYGYDYVQLGSLRINQQVFGVATDSEFASVGILGAGPDLSGWTSPYPFVIDNLVKQGFIKSRAFSLDIRGLDSDRGSVTYGGIDIKKFSGPLAKKPIIPAAQSPDGYTRYWVHMDGMSITKEDGSKFEIFDKPNGQPVLLDSGYTVSTLPGPLMDKILEAFPSARLESTSGDYIVDCDIIDTPGRVNFKFGNVVVDVEYKDFIWQQPDLGICKLGVSQDDNFPVLGDTFLRAAYVVFDWDNQEVHIAANEDCGDELIPIGSGPDAIPASAIGKCSPSVKTDTTTSVAETTATSAAASTSELAATTSEAATTSSEAATTSAAAETTSVPLNTAPATTGLLPTTSHRFSNGTAPYPIPSLSSVAAAAGSSTVPSESSTGAAAAGTTSAATGSGSGSGSGDATTASATYTSTFTTTNVYTVTSCPPSVTNCPVGHVTTEVVVAYTTWCPVENGPHPTAPPKPAAPEITATFTLPNTYTCSQGKNTCSNPKTAPNVIVVTPIVTQTAPVVIPGIAAPTPTPSVAASSPASPSVVPSPTAPVATSPAQSAYYPPPPPPEHAVSTPVANPPAVTPAPAPFPSGGLTTVIAPGSTGVPSQPAQSGLPPVPAGAAGFRAPAAVALLAGAVAAALL

SEQ ID NO: 46 - DNA, 2286 bp, Trichoderma reesei
atgcgttccactctttacggcctcgcggccctgccgcttgcggctcaagccctcgaattcatcgacgacacagtcgcccagcaaaatggaattatgcgatataccctcaccactaccaagggtgccacctcgaagcaccttcacaggcgccaggatagcgccgatttgatgtcccaacagactggctacttttacagcatccagctcgagattggcacaccaccgcaggcagtgagcgtcaatttcgatactggctcctccgagctctgggtcaaccccgtgtgcagcaaggcgacggaccctgccttttgcaagacctttggccagtacaaccattccaccacctttgtcgacgccaaggctcccggaggtatcaagtatggtaccggctttgttgatttcaactacggctacgactatgtccagcttggctctctgcgtatcaatcagcaagtcttcggtgttgccactgacagcgagtttgcttccgtcggtatcctcggtgccggtcccgacctcagcggctggacgagcccctacccctttgtcattgacaacctggtcaagcagggcttcatcaagagcagggctttcagtctcgacatccgtggcctcgacagcgaccgaggctccgtcacctacggcggaatcgatatcaagaagttctctggcccccttgccaagaagcccatcatccccgccgcccagtcccccgatggctacacccgctactgggtccatatggacggtatgagcatcaccaaggaggacggctccaagtttgagatcttcgacaagcccaacggccagccggtgctcctcgacagcggctacaccgtcagcacccttcccggccccctgatggacaagatcctcgaggccttcccctctgctcgtctggagtccacctcgggcgactacattgtggactgcgacatcattgacacccccggccgtgtcaacttcaagtttggcaacgttgtggtcgacgtcgagtacaaggacttcatctggcagcagcctgacctgggcatctgcaagctcggtgtgtcccaggacgacaacttccctgttttgggcgacacctttttgcgcgctgcctacgtcgtctttgactgggacaaccaggaggtccacattgcggccaacgaggactgcggcgacgagctgatccccatcggctccggccccgacgccatcccggcttctgccattggcaagtgctctccctccgtcaagaccgacacgaccacctctgttgcggagaccacagccacctccgctgccgcctcgacgtctgaactggccgccaccacctccgaggctgctaccacctcctccgaggccgccaccacttctgccgccgccgagaccaccagcgtgccgctgaacactgcgcccgccaccaccggacttctgcccacgacctcgcaccggttcagcaacggtaccgccccctaccccatcccgagcctcagctccgtcgccgccgccgccggttccagcaccgtcccctcggaatccagcaccggcgctgctgctgccggcaccacctccgcggccactggctctggctctggctctggctctggcgacgccaccacggcctccgcaacgtacacatcgaccttcaccaccaccaacgtgtacactgtcacctcgtgcccgccttcagtcaccaactgccccgttggccacgtcacgactgaggttgtcgttgcgtacacgacctggtgccccgttgagaacggcccgcatcccacggctcctcccaagcccgcagctcccgagatcactgcaaccttcacgctgcccaacacgtacacctgcagccaaggcaagaacacctgcagcaaccccaagacggcgcctaacgttattgttgtcactcccattgtcacccagacggcccccgttgtcatccctggtattgcggcccccactcccactccctctgtcgccgcctcgtctcccgcctcgcccagcgtggtgccatcgcccactgcccctgtcgccaccagcccggcccagtccgcctactacccgcctccccctccgcctgagcatgccgtctctactccggttgccaaccccccggctgtcacgccggctccggctcccttccctagcggtggactgacgaccgtcatcgcccctggcagcactggcgttccctctcagcctgcccagtctggcctgcctcctgtcccggccggagctgctgggttccgcgcacctgccgcggtggctctgttggccggagccgtggctgctgctttgttgtaa

SEQ ID NO: 47 - protein, 372 aa, Trichoderma reesei
MHAALVSLSIASLAAAALPEGVVEVPLQRIKNQTAYGVEFQVGNPPQKAVISADTGSPTYAFESPRNTVCQQGLCSAYGTYDNTTSTTSKWLSDGYSDMLIDHGFGSFINDTLRIGGVTLNDMMFGVVEQNFASFPINTQQTAIFGLGAFCQTPACDTYSTFLNQLYEHGAIARRAFSVYLGPNDPDATGSLLFGGIDLAKRQGPVHKLKVLDPTVTAANLQPNWVSLSSIELQLSNGTTITSTYDNGTYALWDTGSPGWYVQQDMFDALTSYWGLTNPNPNNDIIVDCKFREPSDDSLAVNIAPGVTINVPLSSLPIDNGDGTCTARVSPWGRVMGDTFLRNVYFTFDYEDLTVEFALVKYTDETNIVKIE

SEQ ID NO: 48 - DNA, 1119 bp, Trichoderma reesei
atgcatgcggccctcgtgtcactatcaatcgcgtctcttgccgcagctgctctacccgagggcgtggtcgaggttccgctccagcgcatcaagaatcagactgcgtacggcgtcgagttccaggtcggcaatccgccccaaaaggctgtcatttctgccgatacaggcagtccgacttatgcctttgagtctccgcgcaacaccgtctgccagcaaggcctctgctcagcctatggaacctacgataacacaacctctaccacgtctaaatggctcagcgacggctactccgacatgctcatcgaccacggcttcggcagttttatcaacgacactcttcgaattggcggcgtcaccctcaacgacatgatgtttggcgtcgttgagcaaaactttgcctcgttcccgatcaatacccagcaaaccgctatttttggcctcggggcattctgtcagacgcctgcgtgcgacacatattcgacgttcctcaaccagctatacgagcacggtgcgattgctcggcgtgccttcagtgtgtatctgggcccaaacgacccggatgctacggggtcgctgcttttcggggggattgatcttgcgaaacgccagggcccggtccataaattgaaggtcctcgatcctacagtaacagcggcgaatctccagcccaactgggtcagcctgtccagcatcgaactccagctttccaatggcactacgattacttcgacgtatgacaacgggacgtatgctctttgggacacggggtccccgggctggtatgtccagcaagacatgttcgacgccctcaccagctactggggcctcacgaatcccaatcccaacaatgatatcatcgttgactgcaagttccgtgagccgtccgacgactcgcttgccgtgaatatcgccccaggagtcaccatcaacgtgcccctgagttcgttgcctattgataacggcgacggcacttgcactgcgcgtgtttcgccttggggaagagtgatgggcgatacgtttcttcgaaatgtctactttacgtttgactacgaggatctgacagttgaatttgctttagtcaagtataccgatgagacgaacattgtcaaaattgagtaa

SEQ ID NO: 49 - protein, 399 aa, Trichoderma reesei
MQPSFGSFLVTVLSASMAAGSVIPSTNANPGSFEIKRSANKAFTGRNGPLALARTYAKYGVEVPKTLVDAIQLVKSIQLAKRDSATVTATPDHDDIEYLVPVKIGTPPQTLNLDFDTGSSDLWVFSSDVDPTSSQGHDIYTPSKSTSSKKLEGASWNITYGDRSSSSGDVYHDIVSVGNLTVKSQAVESARNVSAQFTQGNNDGLVGLAFSSINTVKPTPQKTWYDNIVGSLDSPVFVADLRHDTPGSYHFGSIPSEASKAFYAPIDNSKGFWQFSTSSNISGQFNAVADTGTTLLLASDDLVKAYYAKVQGARVNVFLGGYVFNCTTQLPDFTFTVGEGNITVPGTLINYSEAGNGQCFGGIQPSGGLPFAIFGDIALKAAYVIFDSGNKQVGWAQKK

SEQ ID NO: 50 - DNA, 1200 bp, Trichoderma reesei
atgcagccctcatttggcagcttcctcgtcaccgtcctgtctgcctccatggcagcaggcagtgtcattcccagcacaaacgccaaccctggctccttcgagatcaagagatccgccaacaaagccttcacaggccgcaatggccctctagcattagcccgtacatacgccaagtacggtgttgaagtccccaaaactctggtcgatgctattcaactcgtcaagtccatccagctcgcaaagcgggacagcgccaccgtcactgccacgccggaccacgacgacatcgagtatcttgtccccgtcaagatcggaactcctccccaaacacttaacctggattttgacacgggcagctccgatctctgggtcttctcatcagatgtcgacccgacctcctcccagggccatgacatctacaccccgtccaagagcacatcttccaaaaagttggaaggagcctcatggaacatcacatatggagaccgctcatcatcatccggcgatgtctaccacgatattgtctccgtcggaaacctgacagtaaagtcccaagccgtcgagtccgctcgaaacgtctcggcccagttcacccagggcaacaacgacggcctcgtcggcctggcgtttagctccatcaacacagtcaagcccacgccgcaaaagacgtggtacgacaacatcgtcggcagccttgactctcccgtctttgttgctgatctgcgccacgacacgcccggcagctaccacttcggctccatcccctccgaagcaagcaaagccttctacgcccccatcgacaacagcaagggcttctggcaattcagcacgagcagcaacattagcggccagttcaacgccgttgcagacactggcactactctgctgctcgccagcgacgacctcgtcaaggcctactacgcaaaggtccagggcgcccgtgtgaacgtcttcctgggcggctacgtcttcaactgcaccactcagctgcccgactttacctttactgttggagagggcaacatcactgtccccggtaccttgataaactattccgaggctggcaacggccagtgttttggcggtattcagccgtcggggggtcttccttttgctatctttggtgacattgctcttaaggctgcgtatgttatttttgacagtggcaacaagcaggttggctgggcgcagaagaaatag

SEQ ID NO: 51 - protein, 395 aa, Trichoderma reesei
MKSALLAAAALVGSAQAGIHKMKLQKVSLEQQLEGSSIEAHVQQLGQKYMGVRPTSRAEVMFNDKPPKVQGGHPVPVTNFMNAQYFSEITIGTPPQSFKVVLDTGSSNLWVPSQSCNSIACFLHSTYDSSSSSTYKPNGSDFEIHYGSGSLTGFISNDVVTIGDLKIKGQDFAEATSEPGLAFAFGRFDGILGLGYDTISVNGIVPPFYQMVNQKLIDEPVFAFYLGSSDEGSEAVFGGVDDAHYEGKIEYIPLRRKAYWEVDLDSIAFGDEVAELENTGAILDTGTSLNVLPSGLAELLNAEIGAKKGFGGQYTVDCSKRDSLPDITFSLAGSKYSLPASDYIIEMSGNCISSFQGMDFPEPVGPLVILGDAFLRRYYSVYDLGRDAVGLAKAK

SEQ ID NO: 52 - DNA, 1188 bp, Trichoderma reesei
atgaagagcgcgttacttgccgccgcggcgcttgtcggctccgcccaagccggcattcacaagatgaagctgcagaaggtctccctggagcagcagctggagggttcgagcatcgaggcccacgtccagcagctcggccagaagtacatgggcgtccgccctactagccgtgccgaggtcatgttcaacgacaagccgcccaaggtccagggcgggcacccggttcccgtcaccaacttcatgaatgcccaatacttctctgagattaccatcggcaccccccctcagtcgttcaaggttgtcctcgacacgggaagctctaacctctgggttccctctcagtcgtgcaacagcatcgcctgcttcctgcactccacgtacgattcgtcttcatcgtcgacgtacaagcccaacggctccgattttgagatccactacggatcaggtagcttgactggcttcatctccaacgatgtcgtgacgattggcgacctcaagatcaaggggcaggactttgccgaggcaaccagcgagcccggccttgcctttgctttcggccgcttcgacggcattcttggccttggctacgataccatctcggtcaatggcattgtcccccccttttaccagatggtcaaccagaagctgatcgacgagcccgtctttgctttctacctgggaagcagcgacgagggttccgaggctgtctttggcggcgtcgacgatgctcactacgagggcaagattgagtacattcccctgcgccgcaaggcctactgggaggtggaccttgactccattgccttcggtgacgaggtcgccgagctcgagaacactggcgccatccttgacaccggcacctctctcaacgtcctcccctcgggcctcgccgagctcctgaacgctgagattggcgccaagaagggctttggcggtcagtacactgttgactgctccaagcgtgattccctccccgacatcaccttcagcctggccggctccaagtacagccttcccgccagcgactacatcattgagatgtctggcaactgcatttcgtccttccagggcatggacttccccgagcccgtgggccccctggtcattctgggtgatgctttcttgcgccgctactactccgtctacgaccttggcagggacgccgttggtcttgccaaggccaaataa

SEQ ID NO: 53 - protein, 426 aa, Trichoderma reesei
MKFHAAALTLACLASSASAGVAQPRADEVESAEQGKTFSLEQIPNERYKGNIPAAYISALAKYSPTIPDKIKHAIEINPDLHRKFSKLINAGNMTGTAVASPPPGADAEYVLPVKIGTPPQTLPLNLDTGSSDLWVISTDTYPPQVQGQTRYNVSASTTAQRLIGESWVIRYGDGSSANGIVYKDRVQIGNTFFNQQAVESAVNISNEISDDSFSSGLLGAASSAANTVRPDRQTTYLENIKSQLARPVFTANLKKGKPGNYNFGYINGSEYIGPIQYAAINPSSPLWEVSVSGYRVGSNDTKYVPRVWNAIADTGTTLLLVPNDIVSAYYAQVKGSTFSNDVGMMLVPCAATLPDFAFGLGNYRGVIPGSYINYGRMNKTYCYGGIQSSEDAPFAVLGDIALKAQFVVFDMGNKVVGFANKNTNV

SEQ ID NO: 54 - DNA, 1281 bp, Trichoderma reesei
atgaagtttcacgcagcggctctcacacttgcgtgtttagcaagctcggcctcggccggagtggcccagccaagggccgatgaagtcgagtcggccgagcaaggcaagacgttctcccttgaacagattccgaatgagcgttacaagggcaacatccccgccgcctacatctcggctctggcaaagtacagccctactatcccggacaagatcaagcatgccattgagatcaacccggacctgcaccgcaagttcagcaagcttatcaatgccggcaacatgactggcactgccgttgcctctccgcctccgggagctgatgccgaatatgtgctgcctgtcaagattggcaccccgccccagactctgcccctgaacctcgacacgggctcatctgatctctgggtcatctcgaccgacacttacccgccgcaagtccagggccagacccggtacaacgtcagcgcctcgacgaccgcgcagcgcctcatcggcgagtcgtgggtgattcggtacggcgacggctccagcgccaacggcatcgtgtacaaggaccgggtgcagatcggcaacaccttcttcaaccagcaggcggtggagtcggccgtcaacatctccaacgagatcagcgacgacagcttctcgtcgggcctcctgggggcggccagcagcgcggccaacacggtgcggccggaccggcagacgacgtacctggagaacatcaagagccagctggcgcggcccgtcttcacggccaacctcaagaagggcaagccgggcaactacaacttcgggtacatcaacggctccgagtacatcggccccatccagtacgccgccatcaacccgtcgtcgccgctgtgggaggtctccgtcagcggctaccgcgtcggcagcaacgacacaaagtacgtgccgcgcgtgtggaacgccatcgccgacacgggcaccacgctgctgctcgtgcccaacgacattgtcagcgcctactacgcccaggtcaagggctcgacgttcagcaacgacgtcggcatgatgctcgtgccctgcgccgccacgctgcccgactttgcctttggcctgggcaactaccgcggcgtcatccccggctcgtacatcaactacggccgcatgaacaagacgtactgctacggcggcatccagtcgtccgaggacgcgccctttgccgtgctgggcgacattgccctcaaggcgcagtttgtcgtctttgacatgggcaacaaggttgtcggatttgccaacaagaacaccaacgtctaa

SEQ ID NO: 55 - protein, 488 aa, Trichoderma reesei
MRASPLAVAGVALASAAQAQVVQFDIEKRHAPRLSRRDGTIDGTLSNQRVQGGYFINVQVGSPGQNITLQLDTGSSDVWVPSSTAAICTQVSERNPGCQFGSFNPDDSDTFDEVGQGLFDITYVDGSSSKGDYFQDNFQINGVTVKNLTMGLGLSSSIPNGLIGVGYMNDEASVSTTRSTYPNLPIVLQQQKLINSVAFSLWLNDLDASTGSILFGGIDTEKYHGDLTSIDIISPNGGKTFTEFAVNLYSVQATSPSGTDTLSTSEDTLIAVLDSGTTLTYLPQDMAEEAWNEVGAEYSNELGLAVVPCSVGNTNGFFSFTFAGTDGPTINVTLSELVLDLFSGGPAPRFSSGPNKGQSICEFGIQNGTGSPFLLGDTFLRSAFVVYDLVNNQIAIAPTNFNSTRTNVVAFASSGAPIPSATAAPNQSRTGHSSSTHSGLSAASGFHDGDDENAGSLTSVFSGPGMAVVGMTICYTLLGSAIFGIGWL

SEQ ID NO: 56 - DNA, 1467 bp, Trichoderma reesei
atgagagcctcgcccctggccgttgcaggcgtcgccctggcctctgcagcccaggcgcaagtcgtccagttcgacatcgagaagcgccacgcgccgcggctcagccgccgagacggaaccatcgacggcactctgtccaaccaaagagtccagggcggatactttatcaacgtccaggttggaagtcctggccagaacattacgttgcagctcgacacaggcagtagcgatgtctgggtcccgtcatcaacggctgccatctgcacccaggtctcagaacggaatcccggatgccaattcggaagcttcaaccctgatgactccgatacctttgacgaggtcggccaaggcctgttcgacatcacctacgtcgacgggtcctcgtccaaaggcgattacttccaggacaacttccagatcaacggcgtgaccgtcaagaatctcaccatgggtctcggcctgagctcatcgatccccaacggcctgataggagtgggctacatgaacgacgaggcctccgtcagcacgacccgaagcacctacccgaacctccccatcgtcctgcagcagcagaagctcatcaacagcgtggcctttagcctgtggctcaacgatctggatgccagcacggggtccatcctgttcggcggcatcgacacggaaaagtaccacggcgacctgactagcatcgacatcatctctcccaacggcggcaagacctttaccgagtttgccgtcaacctgtactcggtgcaggccacaagcccgagcggaaccgacacgctctccacaagcgaggatacgctcatcgccgtgctggactctggaacgaccctgacctatctgccgcaggacatggccgaggaggcgtggaacgaagtgggagccgagtacagcaacgagctcggcctggcggtggtcccctgctctgtgggcaacaccaacggcttcttctcctttacctttgccggaaccgacggccctacgatcaacgtcaccctgtccgagctggtcctcgacctcttcagcggcggccccgcgcctcggttctcgtccggccccaacaagggccagtcaatctgcgagtttggcatccagaacgggaccggctctccgttcctgctgggcgacacgttcctgcgctccgcgttcgtcgtctacgacctcgtcaacaaccagattgccattgccccgaccaacttcaactccaccaggaccaacgtcgtcgcctttgcgagcagcggcgccccgatcccgtctgccacggcggccccgaaccagagcaggacgggccattcctcgtcgacgcactcgggcctgtctgctgccagtggcttccacgatggtgacgacgagaatgctggctccttgacgagcgtcttttctggtccgggaatggccgtggtcggcatgaccatctgctacactctgctcggaagcgccatattcggcattggctggctgtaa

SEQ ID NO: 57 - protein, 526 aa, Trichoderma reesei
MRPNSVLLAPLALYASGALAFYPYTPPWLKELEEHNAGEAKRSADNGLTFDIKRRASRRAPASQEEKAAWQAALLSHKYSESVTPSPSPDTTLSKRDNQFSILKAVDPDAPNTAGLAQDGTDYSYFVQASLGSKKTKLYMLLDTGAGSSWVMGTDCVSEACSLHDSFGPEDSDTLKTSTKDFSIAYGSGAVSGSLVNDTIEVAGMSLTYQFGLAHNTSSDFVHFAFDGILGMSMNSGANENFLSALEGAGLLDKSIFSVALARASDGHNDGEVTFGATNPSRYTGDITYTPIPSGTDWSIPLDDMSYNGKKGNVGGINAYIDTGTSYMFGPSKNVKALHAVIDGAKSSDGITWTVPCDTTTPLVVTFSGVDFAISPKDWISPKDSSGKCTSNVYGYEVVSGSWLFGDTFLKNVYAVFDKEQMRIGKTSPRATSPSSPAPTRTPSPATTSPSSASTPGSTPTTSSTRTARPSTSAPSGTSSTGAPSPSASANRDVLRAKRINMLKSISSFWHDPCCCLFLHVSISST

SEQ ID NO: 58 - DNA, 1581 bp, Trichoderma reesei
atgcgcccaaattccgtcctgctagcgcccctggctttatatgcctcgggtgcccttgctttctatccgtatacgccgccgtggctgaaggagcttgaagaacacaatgctggagaggcaaagaggagtgcggacaatggtcttacgtttgacatcaagcggagagcatcccgacgagctccggcatcccaagaagaaaaggctgcctggcaagcggcccttctgtcacacaagtacagcgaatcagtcaccccgagtcccagccctgacaccactctctcaaaaagggacaatcagttctccatcctaaaggccgtcgaccccgatgcgcccaacaccgccggcctcgcccaggacggcaccgactactcgtactttgtacaggcatcgcttggatctaagaagaccaagctgtacatgttgcttgatacgggagccggctcgagctgggtcatgggcaccgactgcgtgtccgaggcgtgctccctgcacgactccttcgggcccgaggactcggacactctgaagactagcacaaaagacttctccattgcgtatggatctggggccgtcagcggctctctggtcaacgataccatcgaggtggcgggcatgagcctgacatatcagtttgggctggctcacaacacctcttcggactttgtgcactttgcctttgacggcatcctcggcatgtcgatgaacagcggcgccaacgagaatttcctgtcggcgctggaaggcgccggcctgctcgacaagagcatcttttccgtcgccctggcgcgagcatctgacggccacaacgatggcgaggtcacgtttggcgccacgaacccttcgcggtacactggcgacatcacctacacccccatccccagcggcaccgattggtccattcccctggacgacatgtcgtataacggcaagaagggaaacgtgggtggcatcaatgcctacatcgacaccggcacctcgtacatgtttggcccgtccaagaatgtcaaggccctgcatgccgttatcgacggcgcaaagagctcagacggcatcacctggacggttccctgcgataccacgacgcccttggtcgtcaccttttccggcgtcgactttgccatttctcccaaggactggatctcccccaaggacagcagcggaaagtgcacgagcaatgtctacggctacgaagtcgtttctggatcttggctctttggcgatacgtttctgaagaatgtatatgccgtctttgataaagagcagatgcggattggtaagacaagtcctcgggcaacctcaccatcgtcacccgcgccaaccaggaccccgtcaccggcaactacgagcccctcctcggcatcgacgcctgggagcacgcctactacctccagtaccagaaccgcaaggccgagtacttcagcgccatctgggacgtcatcaactggggcaccgtcgccaagcgcttcggcaaatagagacgttttgcgcgcaaagagaattaacatgttaaaatctatctcaagtttctggcacgatccttgctgttgcctgtttctacatgtatccataagtagtacatag

SEQ ID NO: 59 - protein, 612 aa, Trichoderma reesei
MAKLSTLRLASLLSLVSVQVSASVHLLESLEKLPHGWKAAETPSPSSQIVLQVALTQQNIDQLESRLAAVSTPTSSTYGKYLDVDEINSIFAPSDASSSAVESWLQSHGVTSYTKQGSSIWFQTNISTANAMLSTNFHTYSDLTGAKKVRTLKYSIPESLIGHVDLISPTTYFGTTKAMRKLKSSGVSPAADALAARQEPSSCKGTLVFEGETFNVFQPDCLRTEYSVDGYTPSVKSGSRIGFGSFLNESASFADQALFEKHFNIPSQNFSVVLINGGTDLPQPPSDANDGEANLDAQTILTIAHPLPITEFITAGSPPYFPDPVEPAGTPNENEPYLQYYEFLLSKSNAEIPQVITNSYGDEEQTVPRSYAVRVCNLIGLLGLRGISVLHSSGDEGVGASCVATNSTTPQFNPIFPATCPYVTSVGGTVSFNPEVAWAGSSGGFSYYFSRPWYQQEAVGTYLEKYVSAETKKYYGPYVDFSGRGFPDVAAHSVSPDYPVFQGGELTPSGGTSAASPVVAAIVALLNDARLREGKPTLGFLNPLIYLHASKGFTDITSGQSEGCNGNNTQTGSPLPGAGFIAGAHWNATKGWDPTTGFGVPNLKKLLALVRF

SEQ ID NO: 60 - DNA, 1839 bp, Trichoderma reesei
atggcaaagttgagcactctccggcttgcgagccttctttcccttgtcagtgtgcaggtatctgcctctgtccatctattggagagtctggagaagctgcctcatggatggaaagcagctgaaaccccgagcccttcgtctcaaatcgtcttgcaggttgctctgacgcagcagaacattgaccagcttgaatcgaggctcgcagctgtatccacacccacttctagcacctacggcaaatacttggatgtagacgagatcaacagcatcttcgctccaagtgatgctagcagttctgccgtcgagtcttggcttcagtcccacggagtgacgagttacaccaagcaaggcagcagcatttggtttcaaacaaacatctccactgcaaatgcgatgctcagcaccaatttccacacgtacagcgatctcaccggcgcgaagaaggtgcgcactctcaagtactcgatcccggagagcctcatcggccatgtcgatctcatctctcccacgacctattttggcacgacaaaggccatgaggaagttgaaatccagtggcgtgagcccagccgctgatgctctagccgctcgccaagaaccttccagctgcaaaggaactctagtctttgagggagaaacgttcaatgtctttcagccagactgtctcaggaccgagtatagtgttgatggatacaccccgtctgtcaagtctggcagcagaattgggtttggttcctttctcaatgagagcgcaagcttcgcagatcaagcactctttgagaagcacttcaacatccccagtcaaaacttctccgttgtcctgatcaacggtggaacggatctccctcagccgccttctgacgccaacgatggcgaagccaacctggacgctcaaaccattttgaccatcgcacatcctctccccatcaccgaattcatcaccgccggcagtccgccatacttccccgatccagttgaacctgcgggaacacccaacgagaacgagccttatttacagtattacgaatttctgttgtccaagtccaacgctgaaattccgcaagtcattaccaactcctacggcgacgaggagcaaactgtgccgcggtcatatgccgttcgagtttgcaatctgattggtctgctaggactacgcggtatctctgtccttcattcctcgggcgacgagggtgtgggcgcctcttgcgttgctaccaacagcaccacgcctcagtttaaccccatctttcctgctacatgtccttatgttacaagtgttggcggaaccgtgagcttcaatcccgaggttgcctgggctggttcatctggaggtttcagctactacttctctagaccctggtaccagcaggaagctgtgggtacttaccttgagaaatatgtcagtgctgagacaaagaaatactatggaccttatgtcgatttctccggacgaggtttccccgatgttgcagcccacagcgtcagccccgactatcctgtgtttcagggcggtgaactcaccccaagcggaggcacttcagcagcctctcctgtcgtagcagccatcgtggcgctgttgaacgatgcccgtctccgcgaaggaaaacccacgcttggatttctcaatccgctgatttacctacacgcctccaaagggttcaccgacatcacctcgggccaatctgaagggtgcaacggcaataacacccagacgggcagtcctctcccaggagccggcttcattgcaggcgcacactggaacgcgaccaagggatgggacccgacgactggatttggtgttccaaacctcaaaaagctcctcgcacttgtccggttctaa

SEQ ID NO: 61 - protein, 533 aa, Trichoderma reesei
MWSLAVAAELLLLAGTASALLFQDLRPPKPDVDLDNNFRIAAAASTPTYGTFQQLIDHDHPELGTFSQRYVWNDEFYAGPGSPIILMGPNESALDGYERYTTNLTLPGVMAQELGAGALIIEHRYWGQSSPFDSLTTENMRYLTLEQSVQDLVYFAQNVVLPFDQNRTSTPDKAPWVLVGCSYSGALAAWVQDLAPGTFWAYQCSSPVVEAIGPLWKYFEQVKLAMPQNCTADYARIVQYIDGVLLGHNQKAKDELKASFNLGDVEHDDDFAAALVSGLYTWQSVLFSDGYSATNRMCDYVENQWPGSTAPAPGKNGVGLTKALAGYAKWFTTLSLPGSCASYGYWTNPNDTSCYDTYNASSPLFTDLSPENTGNRQWWWFLCNEPFKWWQVRGLGNLVSRLVNQPYFERQCGLIFPREGKYTYGIAQGATTARVNRVTGGWYNVNTHRLAWTAGEYDPWRPATVMAVDRPGGPLRSTKQHPVWVVPGAAHCGDMLVRNRNANEGVRNVFDSEVANIKQWVQEFYEEKGKKGN

SEQ ID NO: 62 - DNA, 1602 bp, Trichoderma reesei
atgtggtccctcgcggtagcagcagagctcctcctgctcgccggaacagcctccgccctcctcttccaggacctccggccccccaagcccgacgtcgacctcgacaacaacttccggatcgccgccgcagccagcactcccacctacggcaccttccagcagctcatcgaccacgaccacccggagctgggcaccttttcccagcgctatgtctggaacgacgagttctacgccggccccggctcgcccatcatcctcatggggcccaacgagagcgcgctggacgggtacgagcgctacaccaccaacctcaccctccccggcgtcatggctcaggagctcggcgcgggagccctcatcatcgagcaccgctactggggccagagctcgccctttgacagcctcacgacggagaacatgaggtatctcaccctcgagcagtccgtccaggacctcgtctactttgcgcagaacgtcgtcctgcccttcgaccagaaccgcaccagcacgcctgataaggctccttgggttctcgtcgggtgctcctacagcggtgccctcgctgcctgggttcaggatcttgccccgggcaccttttgggcgtatcagtgctccagtcccgtcgtcgaggcgattgggcccctgtggaagtactttgagcaggtgaagctcgcgatgccgcagaactgcacggcggattacgcgcgcatcgtccagtatatcgatggggttctgctgggccacaaccaaaaggccaaggacgagttgaaggcatcgttcaacctgggggatgtggagcatgacgatgattttgccgcggcgttggtcagtgggctttatacgtggcagagcgtcttgttttcggatggatatagcgcgacgaaccgaatgtgcgattatgtcgagaaccaatggccgggtagcactgctcccgctcctggaaagaacggcgttggactgacaaaggctctggctggatatgccaagtggttcaccaccctcagtctgcctggatcctgcgcttcgtacggatactggaccaaccccaacgacacctcctgctacgacacgtacaacgcatcaagccccctcttcaccgacctcagccccgaaaacacgggcaaccgccaatggtggtggttcctctgcaacgagcccttcaagtggtggcaggtccgcggcctgggcaacctcgtctcccgcctcgtcaaccagccctactttgagcgccagtgcggcctcatcttcccccgcgagggcaagtacacgtacggcatcgcacagggcgccaccacggcccgcgtcaacagggtcaccggcggctggtacaacgtcaacacgcaccgcctcgcgtggacggctggcgagtacgacccctggcggcccgcgaccgtcatggccgtcgatcgaccgggcggaccgctccgctcgacaaagcagcatcctgtgtgggtggttccaggggccgcgcattgcggagatatgctcgtgaggaacaggaatgcgaacgagggcgtgcggaacgtgtttgatagcgaggtcgcgaatatcaagcagtgggtgcaggagttttatgaggaaaagggaaaaaagggaaactaa

SEQ ID NO: 63 - protein, 882 aa, Trichoderma reesei
MVRSALFVSLLATFSGVIARVSGHGSKIVPGAYIFEFEDSQDTADFYKKLNGEGSTRLKFDYKLFKGVSVQLKDLDNHEAKAQQMAQLPAVKNVWPVTLIDAPNPKVEWVAGSTAPTLESRAIKKPPIPNDSSDFPTHQMTQIDKLRAKGYTGKGVRVAVIDTGIDYTHPALGGCFGRGCLVSFGTDLVGDDYTGFNTPVPDDDPVDCAGHGSHVAGIIAAQENPYGFTGGAPDVTLGAYRVFGCDGQAGNDVLISAYNQAFEDGAQIITASIGGPSGWAEEPWAVAVTRIVEAGVPCTVSAGNEGDSGLFFASTAANGKKVIAVASVDNENIPSVLSVASYKIDSGAAQDFGYVSSSKAWDGVSKPLYAVSFDTTIPDDGCSPLPDSTPDLSDYIVLVRRGTCTFVQKAQNVAAKGAKYLLYYNNIPGALAVDVSAVPEIEAVGMVDDKTGATWIAALKDGKTVTLTLTDPIESEKQIQFSDNPTTGGALSGYTTWGPTWELDVKPQISSPGGNILSTYPVALGGYATLSGTSMACPLTAAAVALIGQARGTFDPALIDNLLATTANPQLFNDGEKFYDFLAPVPQQGGGLIQAYDAAFATTLLSPSSLSFNDTDHFIKKKQITLKNTSKQRVTYKLNHVPTNTFYTLAPGNGYPAPFPNDAVAAHANLKFNLQQVTLPAGRSITVDVFPTPPRDVDAKRLALWSGYITVNGTDGTSLSVPYQGLTGSLHKQKVLYPEDSWIADSTDESLAPVENGTVFTIPAPGNAGPDDKLPSLVVSPALGSRYVRVDLVLLSAPPHGTKLKTVKFLDTTSIGQPAGSPLLWISRGANPIAWTGELSDNKFAPPGTYKAVFHALRIFGNEKKKEDWDVSESPAFTIKYA

SEQ ID NO: 64 - DNA, 2649 bp, Trichoderma reesei
atggtgcgctccgccctattcgtgtcgctgctcgcgaccttctccggagtcattgcccgtgtctccgggcatgggtcaaagatcgttcccggcgcgtacatcttcgaattcgaggattcacaggacacggccgatttctacaagaagctcaacggcgagggctcaacgcgcctgaagttcgactacaagctgttcaagggcgtctccgtccagctcaaggacctagacaaccatgaggcaaaggcccagcagatggcccagctgcctgctgtcaagaacgtgtggcccgtcaccctcatcgacgcccccaaccccaaggtcgagtgggttgccggcagcacggcgcctactctggagagcagggcgatcaagaagccaccgatcccgaacgactcgagcgacttccccacgcaccagatgacccaaatcgacaagctgcgagccaagggctacacgggcaagggcgtcagggttgccgtcattgatacaggcattgactacacccaccctgctctcggcggctgctttggtaggggctgtctggtctcctttggcaccgatttggtcggtgacgactacaccggctttaacacgcctgtccccgatgatgaccccgtcgactgcgccggccacggttctcacgttgctggtatcattgctgcgcaggagaatccgtacggcttcactggcggcgctcccgatgtcaccctcggcgcttatcgagtctttggctgcgacggccaggccggtaacgatgtcctgatttccgcttacaaccaggcctttgaggacggtgcccagatcatcactgcctccattggcggtccctctggctgggctgaggagccgtgggccgttgccgtcacccgcatcgttgaggcaggtgttccctgcacggtctctgccggcaacgagggcgactctggtctcttctttgccagcacggcagccaatggcaagaaagtcattgctgtcgcctccgtcgacaacgagaacatcccttcagtgctgtccgtggcctcttacaaaattgacagcggcgctgcccaggactttggctacgtctcctcctccaaggcgtgggacggcgtgagcaagcccctgtatgctgtgtcgttcgacactactattcccgacgatggctgctcgcctctccctgacagcactcccgacctctctgactacattgtccttgtccgccgtggcacctgcacctttgtccagaaagcccaaaatgtcgctgcaaagggcgccaagtacctgctctattataacaacattcccggtgcgctggccgtcgatgtcagcgccgtccccgagattgaggctgtcggcatggtcgatgacaagacgggtgctacctggattgccgccctcaaggatggaaagaccgtcaccctgacactgactgacccgatcgagagcgagaagcaaattcagttcagcgacaacccgacaactggcggtgctctgagcggctacacaacctggggccctacctgggagctggacgtcaagcctcagatcagctctcccggcggcaacattctctccacgtaccccgtggctctcggaggatatgccaccctgtccggtacctccatggcctgccccctgacggcggctgctgttgctctgattggacaagctcgtggcacctttgaccctgccttgatcgacaacttgttggcaacgactgcgaacccccagctgttcaacgacggcgagaagttctacgacttcctcgcccccgttccccaacagggcggtggcctcatccaggcctacgatgccgcctttgcgaccactctcctgtcaccgtccagcctgtcgttcaacgacactgaccacttcatcaagaagaagcagatcaccctcaagaacaccagcaagcagagggtcacctacaagctcaaccacgtccccaccaacaccttttacactctggcacccggtaacggctatccagctccctttcctaacgacgccgttgccgctcacgccaatctcaagtttaatctgcagcaagtgaccctgcccgccggcaggtccatcactgtcgacgtcttccctactccccccagggacgtcgacgccaagcgcctggcgctttggtcgggctacatcacggtcaacggcacggatggcaccagtctgtctgtcccgtaccagggcctcaccggctccctgcacaagcagaaggtgctctatccggaggactcctggatcgccgattccaccgatgaaagcctggcccctgttgagaacggcaccgtcttcaccattcccgcgccgggcaacgctggccccgatgacaagctcccatcgctcgtcgtcagccctgcccttggctctcgttatgtccgcgttgatctcgtcctcctgtccgcgcctcctcatggcaccaagctcaagacggtcaagttcctcgacaccacctccatcggccagcctgccggatcaccgctcctctggatcagccgtggcgccaaccctattgcttggaccggcgagctgtctgacaacaagtttgctccccctggaacgtacaaggccgtgttccatgctctgcgtattttcggcaacgagaagaagaaggaggactgggatgtgagcgaatctcctgccttcaccatcaagtatgcgtag

SEQ ID NO: 65 - protein, 391 aa, Trichoderma reesei
MRLSVLLSVLPLVLAAPAIEKRAEPAPLLVPTTKHGLVADKYIVKFKDGSSLQAVDEAISGLVSNADHVYQHVFRGFAATLDKETLEALRNHPEVDYIEQDAVVKINAYVSQTGAPWGLGRISHKARGSTTYVYDDSAGAGTCSYVIDTGVDATHPDFEGRATLLRSFVSGQNTDGNGHGTHVSGTIGSRTYGVAKKTQIYGVKVLDNSGSGSFSTVIAGMDYVASDSQTRNCPNGSVANMSLGGGYTASVNQAAARLIQAGVFLAVAAGNDGVDARNTSPASEPTVCTVGASTSSDARASFSNYGSVVDIFAPGQDILSTWPNRQTNTISGTSMATPHIVGLGAYLAGLEGFSDPQALCARIQSLANRNLLSGIPSGTINAIAFNGNPSG

SEQ ID NO: 66 - DNA, 1176 bp, Trichoderma reesei
atgcggttgtccgtcctcctgtccgtcctccccctggtgctggccgcccccgccatcgagaagcgagcagagcctgctcctctccttgttcccactaccaagcacggcctcgtcgccgacaagtacattgtcaagttcaaggacggcagctccctccaggcggtcgacgaggccattagcggcctcgtctccaacgccgaccacgtctaccagcatgtcttccgtgggtttgctgccactctggacaaggagactctcgaggctcttcgcaaccaccctgaagtcgactacattgagcaggatgccgttgtgaagatcaacgcctatgtctcgcagactggcgccccctggggccttggccgcatctcccacaaggcccgcggaagcaccacctatgtctacgacgacagcgccggtgccggcacctgttcatacgtgatcgatactggcgtggatgctacacaccctgacttcgagggccgcgccaccctgctccgtagctttgttagcggccagaacactgatggcaacggccacggcacgcacgtctcgggaaccattggcagccgcacctatggcgtcgccaagaagacgcagatctacggcgtcaaggtgctcgacaacagcggctccggcagcttttccaccgtcattgccggcatggactacgtcgccagcgactcccagacgcgcaactgccccaacggctccgtcgccaacatgtcgctgggaggcggctacacggcctcggtcaaccaggctgccgcccgcctcatccaggccggcgtcttcctggccgtggccgctggcaacgacggcgtcgacgcccgcaacacgtcgcctgcctccgagcccaccgtctgcacggttggtgcctcgacctcttctgatgcccgggcctccttctccaactacggctccgtcgtcgacatctttgcccctggccaggacatcctgtctacttggcccaaccgccagaccaacaccatctctggcacctccatggccactcctcacatcgtcggcctcggtgcctaccttgcagggctcgagggcttcagcgacccccaggctctgtgcgctcgtatccagtctcttgctaaccgcaacctgctctcgggcattccatctggaaccattaacgccattgctttcaacggcaacccttccggttaa

SEQ ID NO: 67 - protein, 387 aa, Trichoderma reesei
MGLVTNPFAKNIIPNRYIVVYNNSFGEEAISAKQAQFAAKIAKRNLGKRGLFGNELSTAIHSFSMHTWRAMALDADDIMIKDIFDAEEVAYIEADTKVQHAALVAQTNAAPGLIRLSNKAVGGQNYIFDNSAGSNITAYVVDTGIRITHSEFEGRATFGANFVNDDTDENGHGSHVAGTIGGATFGVAKNVELVAVKVLDADGSGSNSGVLNGMQFVVNDVQAKKRSGKAVMNMSLGGSFSTAVNNAITALTNAGIVPVVAAGNENQDTANTSPGSAPQAITVGAIDATTDIRAGFSNFGTGVDIYAPGVDVLSVGIKSDIDTAVLSGTSMASPHVAGLAAYLMALEGVSNVDDVSNLIKNLAAKTGAAVKQNIAGTTSLIANNGNF

SEQ ID NO: 68 - DNA, 1164 bp, Trichoderma reesei
atgggcctcgtcaccaacccctttgccaagaacatcattcccaaccgctacattgtcgtctacaacaactcgtttggcgaggaggccatctctgccaaacaggcccagtttgctgctaagatcgcgaagcgcaacctcggaaagcgaggtctcttcggcaacgagttgtctaccgccatccactccttcagcatgcacacctggcgtgccatggccctcgatgccgatgatatcatgatcaaggacatttttgacgccgaagaggttgcttacattgaggccgacaccaaggtccagcacgccgccctcgttgcccagacgaatgctgcccctggcttgatccgcctctccaacaaggccgtcggtggacaaaactacatcttcgacaactctgctggctccaacatcacagcttacgttgtcgacactggcattcggattacccacagcgagtttgagggccgtgccacctttggtgccaactttgtcaacgatgacaccgatgagaacggccacggcagccacgttgctggcactattggcggtgctacctttggagtggccaagaacgttgagctcgttgctgtcaaggtcctcgatgccgacggctctggcagcaactctggcgttctcaacggcatgcaattcgttgttaacgacgtccaagccaagaagcgctccggcaaggctgtgatgaacatgtctctgggtggttcattctctactgctgtcaacaacgccattacggctttgaccaacgctggtattgtccccgttgtcgctgccggtaacgagaaccaagacactgccaatacctctcccggctctgcccctcaggccattactgtcggtgccatcgatgccaccaccgacatccgagccggcttctccaactttggcactggtgttgacatctatgctcctggtgttgacgttctgagcgtcggcatcaagtcagatatcgacactgcagtcctcagcggtaccagcatggcttctccccacgttgctggtcttgctgcctacctgatggctcttgagggtgtctccaatgttgacgatgtcagcaacctcatcaagaacttggctgccaagacgggtgctgctgtgaagcagaacattgctgggaccaccagcctcatcgccaacaacggcaacttttaa

SEQ ID NO: 69 - protein, 409 aa, Trichoderma reesei
MASLRRLALYLGALLPAVLAAPAVNYKLPEAVPNKFIVTLKDGASVDTDSHLTWVKDLHRRSLGKRSTAGVEKTYNIDSWNAYAGEFDEETVKQIKANPDVASVEPDYIMWLSDIVEDKRALTTQTGAPWGLGTVSHRTPGSTSYIYDTSAGSGTFAYVVDSGINIAHQQFGGRASLGYNAAGGDHVDTLGHGTHVSGTIGGSTYGVAKQASLISVKVFQGNSASTSVILDGYNWAVNDIVSRNRASKSAINMSLGGPASSTWATAINAAFNKGVLTIVAAGNGDALGNPQPVSSTSPANVPNAITVAALDINWRTASFTNYGAGVDVFAPGVNILSSWIGSNTATNTISGTSMATPHVVGLALYLQALEGLSTPTAVTNRIKALATTGRVTGSLNGSPNTLIFNGNSA

SEQ ID NO: 70 - DNA, 1230 bp, Trichoderma reesei
atggccagccttcgtcgccttgccctctatctcggagccctgctcccggctgttctggccgctcctgctgtcaattacaagctgcctgaagctgttcccaacaagttcattgtcactctcaaagatggtgcctctgttgatacagactctcaccttacatgggtgaaagaccttcacaggcgctcactcggcaagcgcagcactgctggtgttgagaagacgtacaacatcgacagctggaatgcctatgctggcgagttcgatgaagaaaccgttaagcagatcaaggcgaatcccgacgttgcttccgtagagccagactacatcatgtggttgtctgacattgtggaagacaagcgtgctttgaccactcagactggcgccccctggggactcggcactgtctcccaccgcacacccggctcaactagctacatctatgacacttcggctggtagcggaacattcgcctatgttgttgactctggaatcaacattgctcaccagcaattcggcggacgtgccagcctcggctacaacgccgctggtggagatcatgtcgacactctcggccacggcacgcacgtttccggaactatcggtggctctacctatggtgttgctaagcaggccagcttaatctccgtcaaggtcttccagggcaacagcgccagcacctcggtcatccttgacggctataattgggccgtgaacgacattgtctcccgcaaccgcgccagcaagtctgccatcaacatgtctctcggtggcccggcctcttccacctgggctacggcgatcaatgcagcctttaacaagggcgtcctgacgatcgtggccgccggcaatggtgacgctcttggaaaccctcagcctgtctccagtacttctccagccaatgtgcccaacgccatcaccgtcgcagcccttgacattaactggcgcaccgcttccttcaccaattatggtgctggcgttgacgtcttcgctcctggtgtcaacatcctgtcttcgtggatcggctctaacactgccacaaacacgattagcggcacctccatggccactcctcacgttgtcggcctcgctctttacctgcaggctcttgagggccttagcaccccgactgctgtaaccaaccgcatcaaggccttggctactactggacgcgtcaccggcagtctgaatggcagccccaacactctcatcttcaacgggaacagtgcttaa

SEQ ID NO: 71 - protein, 388 aa, Trichoderma reesei
MAWLKKLALVLLAIVPYATASPALSPRSREILSLEDLESEDKYVIGLKQGLSPTDLKKHLLRVSAVQYRNKNSTFEGGTGVKRTYAIGDYRAYTAVLDRDTVREIWNDTLEKPPWGLATLSNKKPHGFLYRYDKSAGEGTFAYVLDTGINSKHVDFEGRAYMGFSPPKTEPTDINGHGTHVAGIIGGKTFGVAKKTQLIGVKVFLDDEATTSTLMEGLEWAVNDITTKGRQGRSVINMSLGGPYSQALNDAIDHIADMGILPVAAAGNKGIPATFISPASADKAMTVGAINSDWQETNFSNFGPQVNILAPGEDVLSAYVSTNTATRVLSGTSMAAPHVAGLALYLMALEEFDSTQKLTDRILQLGMKNKVVNLMTDSPNLIIHNNVK

SEQ ID NO: 72 - DNA, 1167 bp, Trichoderma reesei
atggcctggttgaaaaagctggccctcgtcttgttggcaatcgtgccatatgccacggcttctccggccctcagccccaggtcccgtgagattctgagcctcgaagatctcgaatccgaggacaagtacgtcatcggcctgaagcagggcctgtcgcccacggacttgaagaagcatctactgcgcgtctccgccgtccaatatcgcaacaagaacagcacgttcgaaggcggcactggcgtcaagaggacgtatgccatcggcgactaccgggcatacactgccgtcctcgatcgagacacggttcgagagatttggaacgatactcttgagaagccgccctggggccttgcaacgctctcgaacaagaagccacacggattcctgtaccgctacgacaagagcgcgggcgagggaacctttgcctacgtgctggacacgggcatcaactccaagcacgtggactttgagggccgcgcctacatggggttcagtccgcccaagacggagccgacggacattaacggacacgggactcatgttgcgggcatcatcggcggcaagacctttggcgtggccaagaagacgcagctcatcggcgtcaaggtgtttctggatgatgaggcgacgacgtcgacgctgatggaggggctcgagtgggcagtcaatgacattacgacaaagggccgccagggccgttctgtcattaacatgtctcttggaggaccctattcgcaagcgttgaacgacgccatcgaccacatcgccgacatggggatcctcccggttgctgctgcgggaaacaagggcattccggccacgttcatctcgcccgcttccgccgacaaggcgatgacggtgggcgccatcaactcggactggcaagagaccaacttttccaactttggcccccaggtcaacattttggcgcccggagaagacgtcttgtcggcgtatgtgagcacaaacacggcgacgcgcgtgctatcgggcacttcgatggcggcgcctcacgttgccggactggcgctgtacctgatggcgttggaggagtttgactcgacgcagaagctgacggaccgcatattgcagctggggatgaaaaacaaggtggtcaacctgatgacggactcgcccaacctgattattcacaacaatgtcaaatga

SEQ ID NO: 73 - protein, 705 aa, Trichoderma reesei
MTRQFSSPASANSTYFRQFDCGDIFNGVVVETDIDNVDTLSRVHGVANVWPMKTVPMASGIRRVKAALDFKSHNYSVHQWTGVDQLHTQGIRGKGATIAIIDTGIDYTHRALGGCFGPGCKIAGGYDLVGNSHNEKRFPKDPDQDPMDFHGHGTHVAGIIAAENEWLIGVAPDARLLSFKVFADDPWDTDEDVLIQAFCDAYGAGADVITASIGRPDGFADDPWALVASRIADKGVVVTISAGNEGNTGPFYSSSGANGHNVLSIAAINVTGDPSISTSDPTAAPIPAIFTSWGPTNELLLKPDVGAPGFDIISTVLDNDYDLMSGTSMAAPYIAGIAALYISKHGGREFHGPGFAKMLANRIVSSGVSLGWAADNINFEFRAPPFQVGTGLVNALKVLDYTTQLYFEPFSLSDSIQFRPKWTANITNAGNRTAVYSFEIEPQAGVEILDPHYGIKTAYNLEPMHIVPPVKLPEDVALAPGETREVEFFFGLPQTVNDDYLPLFGGKVWIRGSNGEDLSIPYGGAAYDTEKAFDTMFLGDPFITDWGGNWTSWSFNADRNRFDFMELSARLDYPCFHLRWDIYTAYWTEPHWEYPPIVGVSGYVGAAATMRDADTFWYYDPSRMDKEQTAAFPMMRVPRGYAKHWWFGKLANGSHIAPGNYTLRFAALRPYGNPNISDHWDIMRMPVRNIQVLPYNGTNATIHRG

SEQ ID NO: 74 - DNA, 2118 bp, Trichoderma reesei
atgacacgccaattttcttcgccagcttcggccaatagcacgtacttcaggcagttcgactgcggtgacattttcaatggagttgtcgtcgagactgacattgacaacgtcgacacgctcagcagagtccacggcgtggccaatgtttggcccatgaagactgtcccaatggcgtctggtattcgacgagtcaaggctgcactggacttcaagagccacaattactctgtgcatcaatggaccggcgtcgaccaactccatactcaaggcattcggggcaaaggcgcgactattgccattatcgataccggcattgactatacgcaccgagcgcttggcggctgctttggtccaggctgcaagattgctggaggctatgatctcgttgggaactctcacaatgagaagcggttccccaaggacccggatcaggatccgatggactttcatggccatggaacccatgttgctgggatcattgctgcagagaatgaatggcttattggagttgctcctgacgctcgacttctttcgttcaaggtgtttgcagatgacccctgggacacagacgaggacgtgctcattcaggcattttgcgatgcatatggcgctggagccgacgtcattacggccagcattggtagacctgacggatttgccgacgacccctgggctctggttgcgagcagaatcgccgacaagggcgttgttgttaccatctcagcgggcaatgaaggcaacactgggccattctactcaagcagcggcgccaacggccacaatgtcttgtctatagctgccatcaacgttacgggggacccaagtattagcacgtccgatcccaccgcggcacccattcccgccattttcacgtcatgggggcctaccaacgagttgctcctcaaacctgatgttggtgccccaggctttgacatcatcagcaccgtgctggacaacgactacgacttgatgagcggaacgtccatggccgcgccgtatatcgcaggaattgctgctctttacatctcaaagcatggcggtcgggaattccatggccccggatttgcaaaaatgcttgccaaccgcattgtttccagcggagtcagtcttgggtgggctgccgacaacatcaacttcgaattcagagcgcctccctttcaggttgggactggcctggtgaatgctctcaaggttctggactataccactcagttatatttcgagcctttctctttgtcggattccattcagtttcggccgaaatggactgccaacatcacgaatgcaggcaatcgaacagccgtgtattctttcgagattgaaccccaagctggagtggagatcttggatcctcactacggtatcaaaaccgcctacaacctggagccaatgcacattgtaccgccggtcaagttgcccgaggatgttgcactggcaccaggggagacgcgagaagtcgagttcttctttggacttcctcaaactgttaatgatgattacctcccactgttcggtggtaaagtttggataagagggagcaacggtgaagatctctcaattccctatggaggggccgcatacgatacagagaaggcgtttgataccatgttcttgggcgaccctttcatcacagactggggcggcaactggaccagctggtcattcaatgcagacagaaaccggttcgatttcatggaattgtctgcacgcctcgattatccatgtttccacctccgttgggatatatacactgcatattggactgagccccattgggagtatcctcccattgtcggggtatcaggctacgttggtgcggcggccacgatgcgagatgccgataccttttggtattacgatccaagccgcatggacaaggagcaaacggcggcatttcccatgatgagagttccccgtggctatgcgaagcattggtggtttggcaagctggcgaacggaagccatattgcgccaggcaattacaccctgcgatttgcggctttgcgcccctacggcaatccaaacatctcggatcactgggacattatgcgcatgcctgttcgaaacattcaagtcttgccatataacggcacgaatgccaccatacatcgaggttga

SEQ ID NO: 75 - protein, 948 aa, Trichoderma reesei
MKFSPTLGLLALVSGASSLTVTTNVDQLRSKQNTTVVPNTFIVELQPDFHPGLQPKDRFAKTKPGAKPNWRVRHQYNDTDIFYGVSVSFDSPVDLATLRTSAGVKNAWSVAVVPRPELRGLWGVNKGGTKLPDYRGSSDVNRPLDMGNVQKLHDKGIKGKGVQVALIDSGIDYTHPALGGGFGRGHKVALGYDFVGDAYDGSNDPQPDGDPLATCADGGHGTHTAGIVAMQDPKKQGFGLVGVAPEATLAAYRVFGCEGGATNDILIAAMIQAWRDGADIVSMSLGLWQAWEEINPFEDVVDKLTSHGVAVVASIGNFGTAGPYSSSTPAISLSALSVGSIESDIYPTAWTAHDDQHRAINYINVFPASELGRVEVVQLGYGLAVPITPNITSGCDQDAWDALSNAQLNWNTTILQVSWESWCGTAWGPAADLGVKALLVTMSEAQDILVDEPGSEPAALYLDIDNSKLLLSRLAKQPAGKKYALTFDGTKAVDVANPYGSAPDYFSSFGPTIEMTLEPKISAPGGTILSTFPVDAGGYAVLSGTSMSAPFVSGSLALLKSQNPRLTVPQLFARLMTTARPVNELNSKLTASAARQGAGMIDAYAAVTADTVISPAEFSLRDSASPAPQKITISNQSRSRKRYSLQHVPGTFYRLSNNYLSDIKDNFSSANLPLTLDIPASAQFSQSSVTLGPGQSVTVEVQIKPQPDMYPFANPVYSGFIKITADDDDEYSVPYLGVPYNRTEVGPIVHNVTTVKPYDSPGILKAQATNLFLADALTPTPNLETYNWTTDLDEAYIPVFRIDTIMTRFLRLELVPANVSFVPSMYGFDPDVHIDYKFPDQPILPGFLDVPTYGLVLAESLEPQPEGSPIMQSTDIGHFLGLALLDPSLTSDKGDKFRIAAGDYRVLFRTLRWRGNETNPDDYESWLGPVMRFDIPSDLPPDFPNSSE

SEQ ID NO: 76 - DNA, 2847 bp, Trichoderma reesei
atgaagttcagtcctaccttgggcctgctggccctcgtgagcggagcatcttccctcaccgtcacgacgaacgtggaccagctgcggtcgaagcaaaacacaaccgtcgtccccaacaccttcatcgtcgagctgcagccagacttccacccaggactccagcccaaggaccggttcgcaaagaccaagccgggagccaagcccaactggcgtgtgcgccaccagtacaacgacaccgacatcttctacggcgtgtcggtttcgttcgactcccccgtcgaccttgcgacactgagaacgtctgccggtgtcaagaatgcctggagcgtcgccgttgttccgcggccggagctgcgtggcctctggggagtcaacaagggagggacgaagctgccggattaccggggcagctccgacgtgaaccgtccgctggacatgggcaacgtgcagaagcttcacgacaagggcatcaagggcaagggcgtgcaggtggccctcatcgacagcggcatcgactacacgcatcctgcgctgggaggcggctttgggcgaggccacaaggttgccctgggctacgactttgtgggagatgcatatgacggctccaacgacccccaaccggacggcgaccccctggcaacatgtgcggatggtggtcacggcactcacacggctggcatcgtggccatgcaggaccccaagaagcagggcttcggcctcgtcggcgtggctcctgaagcaacgctggccgcgtaccgcgtctttggctgcgaaggaggcgccaccaacgacatcctgattgcggccatgatccaggcgtggcgagacggcgccgacatcgtgtccatgtccctcgggctctggcaggcctgggaggagatcaacccctttgaggacgtcgtcgacaagctgaccagccacggcgtggcagtcgtcgcctccataggcaactttggcactgccgggccgtactcgtcgtcgacgcccgccatctcgctgagtgccctctctgtgggctctatcgagagcgacatctacccgaccgcgtggacagctcacgacgaccagcacagggccatcaactacatcaacgttttccccgcctctgagctgggccgcgtcgaggttgtccagctgggatacggcctggccgtccccatcacccccaacatcacgagcggctgtgaccaggatgcctgggacgccctttcaaacgcgcagctgaactggaacacgaccattctgcaggtgtcgtgggagtcctggtgcggcactgcctggggtcccgctgccgatctgggcgtcaaggcgctcctggtcaccatgtcagaggcccaggacatcctcgtcgacgagccagggagcgagcccgcggcgctgtacttggatatcgacaactcaaagctgttgctgagccgcctcgccaagcagccagccggcaagaagtacgccctgacgtttgacggcaccaaggccgtcgatgtggcgaacccctatggcagcgcccctgactacttttccagcttcggcccgacgatcgagatgacgctggagcccaagatctcggccccaggaggcaccatcttgtcgacgtttcccgtcgacgcgggtggctacgcggtgctgtcgggaacctccatgtccgccccctttgtctccggcagcctggcgctgctcaagtcgcagaacccgcgcctgaccgtgccccagctctttgcgcggctcatgacgacggcgaggccggtcaacgagctcaactccaagctgacggcatctgcggcccgccaaggtgccggcatgattgacgcctacgcggccgtcacggcagacacggtcatcagcccggccgagttcagcctgcgcgactcggcctcgccggcgccgcagaagatcaccatctcgaaccagtcgcgctcccgcaagcgctactcgctccagcacgtcccggggacgttctaccgcctctccaacaactatctgtctgacattaaggacaacttttcgagtgcgaatctccccctgactctggacatacccgcttccgcccagttctcgcagtcgtcggtgactcttgggcccggccagtctgtcacggtcgaggtccagatcaagccgcagcccgacatgtacccgttcgcgaaccctgtgtacagcggcttcatcaagatcacggccgacgacgacgacgagtactcggtgccataccttggcgtgccctataaccggaccgaggtcggccccatcgtccacaacgtgacaaccgtgaagccgtacgactctcctgggatcctcaaggcacaagccaccaacctgttcctcgcggatgccctgacgccgacgcccaacctcgagacgtacaactggacgacggacctggacgaggcctacatccccgtcttccgcatcgacacgatcatgactcgcttcctgcggctcgagctggtgcccgccaacgtctccttcgtgccgtccatgtacggcttcgacccggacgtccacatcgactacaagttccccgaccagcccatcttgcccggcttcctcgacgtgcccacgtacggcctcgttcttgccgaatccctcgagcctcagccggagggaagccccattatgcaatcgaccgatattggccacttcctggggctggccttgttagacccttccctgacaagcgacaaaggcgacaagtttaggatcgcggcgggcgactatcgggtgctgttccgtactttaaggtggcgtggcaacgagacgaatcccgacgactacgagtcctggctggggccggtcatgcggttcgacattcctagcgacctgccgcccgactttccaaacagctccgagtag

SEQ ID NO: 77 - protein, 1065 aa, Trichoderma reesei
MHATRWRQHHLQPQNDNGRRRGRATGESTENIRKGLLADIRTKVSKAQPIDSIEVYGDRLEKCVIDSKERSQTLLHWIVTQVETQDREAPDAEDFKLAAQKMVQLAMKFNDKLISEVDNAGETALHHALTSHDDRVSSLIETMCDHDGGKEYLQRAIAHANNDGDNCLHLAIDHRPDIAEKLISIANEAAFCQKRCRNKKHIGQASPDHGNTPLHDAVSYERGVINKPHCLNPTNGNQCERCHVLTMEYNQAVSDATMLVIRLIERCDKALKIKNDNDESPFLYYLRTKAEFQPEEANKNSVAAFREPTACCASPNNEASMSIESHLIESAFFVGGFKDACACFFGDKADQDGKSWPLRPGYPIMVKSHETYKQFIPQGTHVISHVDLQIGRSASSQTDKPTHPAVRKGGGSSTVLRQEIEPANEHGDDDDRIIAQWQNDMLSLTKIFKMLKQQGVKRILKVTIKDNSKRPCSDQVIQQCLAGFDVRYLDWNKPDLSVSIICASCPKIAELTLYSSGRRAVLESWASNTGLCRLRQLLRVNLETVAGLEEYGVYKTIVDGFQTELIENIQLIRRKLVLASIMETCELEIQDLEDYVRNLAISNENGDDPDPYPEMLEDKRKKIETYRKDLASLEREGANLEAQRLNLLLGNTGVATVTAANAVSHEFGKNGGDGNSDGNNRPPADKGKLFDGLNFREIPTATSRKWLYGADYDVASTMGSRLCKTTTKVDDYSPGSIVSLEFEAKIFMESPTSSHQGTVRTVTNSDGTIIEVSTALFVRKWVQTPEIEKWEPVKVALIDDGIDIRQFEHSVHHPGWPPAKPYSDEKLWYHSERGHGTIMAKMIYKMCPRVELFVAKLADFHDPKKLDNADKAADAIAWAIENRVDIISMSWSLVASDDNKDGISKLERKIKEAADAKILLYCAAADKAGFVKNDTLFPHSSRTPYIRIVGSAKETGGESTFVDPTQVHYLFPGERIPDLGETKGSSVATALAAGFAALILWCFRSKGESDKDIADPDGMHIVFQSLVKHPNKWVNVANLLGIDSVEDVDEVIKWCKSALYAENRR

SEQ ID NO: 78 - DNA, 3198 bp, Trichoderma reesei
atgcacgcgacccgatggcggcagcaccatctgcagccacagaatgataatggacgacgacgaggaagggcaacaggagagtcaacagagaacattcgtaaaggcctactggcagatatccggacgaaagtctccaaagctcaaccgatcgattccattgaggtatacggagatcgcctggaaaaatgtgtgatcgactctaaggagagaagccaaacactgctccactggatcgtgacgcaagtcgagactcaagaccgcgaagcgcctgatgccgaggacttcaagcttgcggcccaaaaaatggtgcaattggcgatgaagttcaatgacaagttgatcagcgaagtcgacaatgctggagaaacggcgctacaccatgctcttacctcacacgatgacagggtttcctccctaattgaaacgatgtgcgatcacgatgggggcaaggagtatctgcaacgcgcaattgctcacgccaacaacgatggggacaattgcttacacttggcaattgaccacaggcctgatattgctgaaaagctcatatctatcgcaaatgaggcagccttctgccaaaagcgctgtcgtaacaaaaagcacatcggccaagcatcgcccgatcatggcaacacgccccttcacgatgctgtgagttacgaacgcggtgtcatcaataaaccccattgtctcaatcccacgaacggtaatcaatgcgaacgctgccacgttctcaccatggaatacaatcaggcggtgtccgacgctacaatgctcgttataaggctaattgagcggtgcgacaaagcattgaagatcaagaatgacaatgatgagtcacccttcttatactatctccgaaccaaagcagaattccaaccggaagaggcgaacaagaactctgtagcggcattccgggagcctacagcctgctgcgcaagccccaacaacgaggcctcaatgagtatagagagtcacctcatcgagtcggctttttttgttggtggattcaaagatgcatgcgcctgtttctttggggataaagctgatcaggatggcaagagttggcctttgagaccaggttatccaatcatggtgaagtcgcacgaaacgtataaacaattcattcctcagggcacacatgttatatctcacgtggacctgcagattggcaggtccgcgtcttctcaaactgataagcctacccacccggcagtacggaagggaggaggaagcagcactgttttacgacaagaaatcgagcccgccaacgaacatggagatgatgatgatcgcatcattgcccagtggcagaacgatatgctatcgttaaccaaaattttcaagatgctgaagcagcagggcgtgaaacgaatcctcaaagtcactatcaaggacaactcaaaacggccatgtagcgaccaagtcattcaacaatgcctcgcaggtttcgacgtccggtatctggactggaacaaaccggacttgagcgttagcatcatttgtgcctcatgcccaaaaattgcggagttgacactctattcttccgggcgtagagctgttctggaaagctgggcatccaatacgggcctttgcaggttacgacaactactgcgcgtgaatctggaaaccgtagcaggcttggaggaatacggtgtctataagacaatagtggatggcttccagacagagttgatcgagaacatacagctcatacgacggaagttggtccttgcatcgatcatggagacgtgtgagctagaaattcaagacctcgaagactatgtccgaaaccttgccatatccaacgagaatggagacgacccggacccctacccagagatgcttgaagacaaaaggaagaaaatcgaaacatatcgaaaagacttggcttcactagaaagagagggcgcgaatcttgaagctcaacgtttgaatctcctcttgggtaacaccggcgtcgctacggtcactgctgccaacgctgtgtcgcatgaatttggaaaaaacgggggagatggcaattctgatggcaacaatagaccaccggcggataagggcaagttattcgatggcttgaatttcagggaaatacccactgcgacatctcggaaatggctgtatggcgctgattacgatgtagcttccactatggggtcaaggctatgcaagaccaccaccaaagtggacgactacagccctggaagcattgtgagtctcgagttcgaagcaaaaatcttcatggaatcgcccacatcgagccatcaaggaactgtgcggacggtgaccaatagcgatggcacgataattgaggtctctaccgccttatttgtccggaaatgggtacagacacccgagattgagaaatgggagccagtcaaggtggcactcattgatgatggcatcgacatccgtcagtttgaacattccgtgcatcatccgggatggccacctgcaaaaccgtacagcgatgagaaactgtggtatcattcagaaaggggccatggcaccataatggccaagatgatctacaagatgtgtccgcgcgtggagctctttgttgccaaattggccgacttccacgatcccaagaagcttgacaatgccgacaaggctgcagatgctattgcatgggcaatcgagaacagagtcgacatcatctccatgagctggagtttggtggcatcagacgacaacaaggacgggataagcaaattggagcgaaagatcaaagaagccgctgatgcgaaaatcctcttgtattgcgcggctgccgacaaagcaggctttgtcaagaatgacaccctgttcccgcacagcagcaggacaccttacatcaggattgttggctcagcgaaggagacaggcggcgagtcgacttttgttgatcccacccaagtccattatctgtttcccggagagcgaatccctgatcttggagagaccaagggcagctcggtcgccactgctctcgccgccggcttcgctgccctcattctctggtgtttcaggagcaaaggcgagagcgacaaagacatagctgacccagacggcatgcacatcgtcttccagagcctggtaaagcatccaaacaagtgggtcaacgtagcgaatctgcttggaattgatagcgttgaggatgtggatgaagttattaaatggtgcaagtcagctctttatgctgaaaataggcgatag

SEQ ID NO: 79 - protein, 259 aa, Trichoderma reesei
MAPASQVVSALMLPALALGAAIQPRGADIVGGTAASLGEFPYIVSLQNPNQGGHFCGGVLVNANTVVTAAHCSVVYPASQIRVRAGTLTWNSGGTLVGVSQIIVNPSYNDRTTDFDVAVWHLSSPIRESSTIGYATLPAQGSDPVAGSTVTTAGWGTTSENSNSIPSRLNKVSVPVVARSTCQADYRSQGLSVTNNMFCAGLTQGGKDSCSGDSGGPIVDANGVLQGVVSWGIGCAEAGFPGVYTRIGNFVNYINQNLA

SEQ ID NO: 80 - DNA, 780 bp, Trichoderma reesei
atggctcccgcttcccaagtcgtctcagctctcatgctgcccgctctcgccttgggagccgccatccagccccgtggcgctgacatcgtgggaggaaccgccgcctcgctcggcgagttcccctacattgtcagtctgcagaaccccaaccagggcggccacttctgcggtggtgtcttggtcaacgccaacaccgtcgttaccgccgctcactgctccgttgtctaccctgcctcgcagatccgcgtccgcgccggtactcttacctggaactctggcggtaccctggtcggcgtctcccagatcatcgtgaacccgtcctacaacgaccgcaccaccgactttgacgttgccgtctggcacctgtccagccctatccgcgagagctccaccattggctacgccactcttcccgcccagggctccgaccccgtggccggctcgaccgtcaccaccgctggctggggcaccaccagcgagaactccaactccatcccctcccgcctgaacaaggtctccgtccccgtcgtcgcccgctccacctgccaggccgactaccgcagccaggggctcagtgtcaccaacaacatgttctgcgccggcctcacccagggcggcaaggactcttgctctggcgactctggcggccccatcgttgacgccaacggtgtcctccagggtgtcgtttcttggggtatcggctgtgctgaggccggtttccctggtgtctacaccagaatcggcaactttgtcaactacatcaaccagaacctcgcataa

SEQ ID NO: 81 - protein, 256 aa, Trichoderma reesei
MFIAGVALSALLCADTVLAGVAQDRGLAARLARRAGRRSAPFRNDTSHATVQSNWGGAILEGSGFTAASATVNVPRGGGGSNAAGSAWVGIDGASCQTAILQTGFDWYGDGTYDAWYEWYPEFAADFSGIDIRQGDQIAMSVVATSLTGGSATLENLSTGQKVTQNFNRVTAGSLCETSAEFIIEDFEECNSNGSNCQPVPFASFSPAITFSSATATRSGRSVSLSGAEITEVIVNNQDLTRCSVSGSSTLTCSYV

SEQ ID NO: 82 - DNA, 771 bp, Trichoderma reesei
atgttcatcgctggcgtcgccctctccgcccttctttgcgccgataccgtcttggctggtgttgcccaggaccgaggccttgccgctcgtctcgctcgccgtgctggccgtcgttcggctcctttcagaaacgacaccagccatgctactgttcaatctaactggggtggtgccatacttgagggatctggctttaccgcagcttcggctactgtgaacgtgccaaggggtggtggcggatccaatgctgctggctctgcttgggttggcattgatggcgccagctgccagactgccattctccagacgggatttgactggtacggtgatggcacctacgatgcctggtatgagtggtaccctgagtttgctgccgacttctcgggcattgatatccgccaaggcgaccaaattgccatgtctgttgttgccacctctttaaccggcggctctgctacgctcgagaacctttccactggccagaaggttactcagaacttcaaccgtgtcactgctgggtctctctgcgaaacaagcgccgagttcattatcgaggactttgaggagtgcaactcgaacggcagcaactgccagcctgtgccatttgcttctttcagccccgccattactttcagctctgccacagccactcgaagcggccggagcgtttctctgagcggcgctgaaatcaccgaggttattgtcaacaaccaggaccttaccagatgctccgtctccggtagcagcaccttgacctgctcttacgtttag

SEQ ID NO: 83 - protein, 265 aa, Trichoderma reesei
MKTLAFATNVLLLAGAALASPLAARKQAAMDAIRARSAARRSNRFQAGSSKNVNGTADVESTNWAGAAITTSGVTEVSGTFTVPRPSVPAGGSSREEYCGAAWVGIDGYSDADLIQTGVLWCVEDGEYLYEAWYEYLPAALVEYSGISVTAGSVVTVTATKTGTNSGVTTLTSGGKTVSHTFSRQNSPLPGTSAEWIVEDFTSGSSLVPFADFGSVTFTGATAVVNGATVTAGGDSPVIIDLEDSRGDILTSTTVSGSTVTVEYE

SEQ ID NO: 84 - DNA, 798 bp, Trichoderma reesei
atgaagaccctcgctttcgccacaaacgtcctgctgctggctggtgccgctttggcatcccctcttgccgcacgcaagcaggcggctatggatgctatccgagccaggagtgctgcccgccgctccaacaggttccaagccggctcatctaagaacgtcaatggaacggccgatgttgagtctacgaactgggcaggcgccgctatcacgacttcgggcgttaccgaggtcagcggcaccttcacggtccccaggcccagcgtcccagctggtggcagttctcgcgaggagtactgtggtgctgcttgggttggaattgacggctactctgatgccgacctcatccagactggcgtcctttggtgcgtcgaagacggcgaatacttgtacgaggcttggtatgagtaccttccggccgcgttggttgagtactctggcatctctgtgacggctggatcggttgtcaccgttactgccaccaagactggcactaacagcggcgttactaccctgacaagcggtgggaagactgtatcgcacaccttctcccgacagaactcacccctgcccggcacgagcgctgagtggattgtcgaggactttacctctggcagctcgttggttccctttgcagactttggatccgttacctttaccggagccaccgctgtcgtgaacggagcaactgtgacagcgggcggcgactctcccgtcattatcgacctggaggactcaaggggagacattctcacatcaacaacggtctctggcagcactgtgactgttgagtatgaatag

SEQ ID NO: 85 - protein, 452 aa, Trichoderma reesei
MEAILQAQAKFRLDRGLQKITAVRNKNYKRHGPKSYVYLLNRFGFEPTKPGPYFQQHRIHQRGLAHPDFKAAVGGRVTRQKVLAKKVKEDGTVDAGGSKTGEVDAEDQQNDSEYLCEVTIGTPGQKLMLDFDTGSSDLWVFSTELSKHLQENHAIFDPKKSSTFKPLKDQTWQISYGDGSSASGTCGSDTVTLGGLSIKNQTIELASKLAPQFAQGTGDGLLGLAWPQINTVQTDGRPTPANTPVANMIQQDDIPSDAQLFTAAFYSERDENAESFYTFGYIDQDLVSASGQEIAWTDVDNSQGFWMFPSTKTTINGKDISQEGNTAIADTGTTLALVSDEVCEALYKAIPGAKYDDNQQGYVFPINTDASSLPELKVSVGNTQFVIQPEDLAFAPADDSNWYGGVQSRGSNPFDILGDVFLKSVYAIFDQGNQRFGAVPKIQAKQNLQPPQ

SEQ ID NO: 86 - DNA, 1359 bp, Trichoderma reesei
atggaagccatcctccaggcccaggcaaagttcaggctcgaccgcggcctccagaaaatcaccgccgtgcgcaacaagaactacaagcgtcacggccccaagtcctacgtctacctcctcaaccgctttggcttcgagcccaccaagcccggcccttacttccagcagcaccgcatccaccagcgcggcctcgcccacccagacttcaaggccgccgtcggcgggagagtcacgaggcagaaggtgctcgccaagaaggtcaaggaggatgggacggtcgatgcgggcggcagtaagacgggagaggtcgatgctgaggaccagcagaatgactctgaatacctttgcgaggtgaccatcggaactcctgggcagaagcttatgctcgactttgacaccggctcatccgatctctgggtcttctctacagaactgagcaagcatcttcaagaaaaccacgccatcttcgaccccaaaaagtcgtccacgttcaagcccctaaaggaccagacatggcaaatctcctacggcgacggcagctccgcctcgggcacctgcggctccgacaccgtcaccctcggcggtctctccatcaagaaccagaccattgaactcgcctccaagctcgcgccccagttcgcccagggcaccggcgatggcctcctcggtctcgcctggccgcagatcaacaccgtccagacggacggccgcccgacgcccgccaacacgcccgtcgccaacatgatccagcaggacgatatccccagcgacgcccagctctttaccgccgccttctacagcgagcgcgacgaaaacgcagagtctttctacacctttggctacatcgaccaggacctcgtgtccgcctcgggccaggagattgcctggacggatgtcgacaactcgcagggcttctggatgttcccttccactaagactaccatcaacggcaaggacatttctcaggagggtaacaccgccattgccgacactggaaccaccctcgctctggtctccgacgaggtctgcgaggcgctgtacaaggccatccctggcgccaagtacgacgataaccagcagggctacgtcttccccatcaacaccgatgcttcgagtctgcccgagctcaaggtctcggttggaaacacgcagtttgtcatccagcccgaggacctggcttttgctcctgcggacgacagcaactggtacggcggtgttcagtcgaggggaagcaacccctttgacattctgggtgacgtattcctcaagtcggtctatgcgatctttgatcagggcaaccagcgattcggcgcagtccccaagatccaggcaaagcagaacctgcagcccccccagtaa

SEQ ID NO: 87 - protein, 548 aa, Trichoderma reesei
MRLSTSALVLGAASSAMAFQDQKVLSDPSSKPAVKFGSDFESLASSLKESFGELTADAKAVWDEVAMLAPDAMAAFKEQVKGIKPKKHDRKPDGDWDHVVKGADVQKLWVEDESGEPRRLVGGKLSNYSLRAKKVNPEKLGVDKVKQFSGYLDDDEKDKHLFYWFFESRNDPKNDPVILWLNGGPGCSSLTGLFFELGPASINKKIEVVHNPHAWNNNASVIFLDQPVNVGYSYGSGSVSDTVAAGKDVYALMTLFFHQFPEYSHQDFHIAGESYGGHYVPTFASEILSHKDRNINLKSIAVGNGLTDEFTQYAYYRPMACGEGGYPAVLSESQCNAMDNALPRCQSLIKNCYDSESAWLCVPAAIYCNNAFIGPYQQTGYNPYDIRSKCEDSGNLCYEGLGYISEYLNKPEVMEALGAEVSSYESCNFQINRDFLMRGDWMKPIYRLVPDLLKQIPVLIYAGDADFICNWLGNKAWVTQLEWEHGDSFRSAEAKDLTVGDKTYGNVLSSHNLTWIQVYGAGHMTPTDEPEGSINFINRWIAGEWVAK

SEQ ID NO: 88 - DNA, 1647 bp, Trichoderma reesei
atgcggttgtccacctccgccctcgtgctgggcgccgcctcctcggccatggccttccaggaccaaaaggtcctcagcgacccctcgtccaagccggcggtcaagttcggctccgacttcgagtcgctggcctcgtccctcaaggagtcgtttggcgagctgacggccgacgcaaaggccgtctgggacgaggtcgccatgctggcccccgacgccatggcggccttcaaggagcaggtcaagggcatcaagcccaagaagcacgaccgcaagcccgacggcgactgggaccacgtcgtcaagggcgccgacgtccagaagctgtgggtggaggacgagtcgggcgagccgcgccggctggtcggcggcaagctgtccaactacagcctgcgggccaagaaggtcaatcccgagaagctcggcgtcgacaaggtgaagcagtttagcggataccttgatgacgacgagaaggacaagcacttgttctactggttcttcgagtcccgtaacgaccccaagaacgaccccgtcatcctgtggctcaacggtggcccaggctgctcctccctcaccggtctcttcttcgagctgggaccggcctccatcaacaagaagattgaggttgttcacaaccctcacgcatggaacaacaacgcttccgtcatcttcctcgaccagccggtcaacgtcggctactcgtatggtagcggctcggtcagcgacactgttgctgccggcaaggacgtttacgctctcatgaccctcttcttccaccagttccctgagtactcccaccaggacttccacattgccggagagtcgtatggcggacactacgtccccacttttgcctccgagatcctctcccacaaggaccgcaacatcaacctcaagagcattgccgtcggcaatggcttgaccgatgagttcacccagtatgcctactaccgccccatggcctgcggcgagggtggctaccctgccgtgctgagcgagagccagtgcaacgccatggacaacgccctgccccgctgccagagcctcatcaagaactgctacgactctgagagcgcgtggctctgcgtccccgctgccatctactgcaacaacgccttcattggaccgtaccagcagaccggctacaacccctacgacatccgctccaagtgcgaggactccggcaacctgtgctatgagggtctcggctacatctccgagtacctgaacaagcccgaggtcatggaggctctgggtgccgaggtctccagctacgagagctgcaacttccagatcaaccgtgactttttgatgcgtggtgactggatgaagcccatctaccgcctcgtccccgacctcttgaagcagattcctgtcctcatctacgccggtgacgccgactttatctgcaactggctcggcaacaaggcctgggtcactcagctcgagtgggagcacggtgacagcttccgctccgccgaggccaaggatcttaccgttggcgacaagacgtacggcaacgtcctgtcctcgcacaacctcacctggatccaggtgtacggcgccggccacatgacgcccacggacgagcccgagggcagcatcaactttatcaaccgctggatcgccggcgagtgggttgccaaataa

SEQ ID NO: 89 - protein, 477 aa, Trichoderma reesei
MRFVQYVSLAGLFAAATVSAGVVTVPFEKRNLNPDFAPSLLRRDGSVSLDAINNLTGGGYYAQFSVGTPPQKLSFLLDTGSSDTWVNSVTADLCTDEFTQQTVGEYCFRQFNPRRSSSYKASTEVFDITYLDGRRIRGNYFTDTVTINQANITGQKIGLALQSVRGTGILGLGFRENEAADTKYPTVIDNLVSQKVIPVPAFSLYLNDLQTSQGILLFGGVDTDKFHGGLATLPLQSLPPSIAETQDIVMYSVNLDGFSASDVDTPDVSAKAVLDSGSTITLLPDAVVQELFDEYDVLNIQGLPVPFIDCAKANIKDATFNFKFDGKTIKVPIDEMVLNNLAAASDEIMSDPSLSKFFKGWSGVCTFGMGSTKTFGIQSDEFVLLGDTFLRSAYVVYDLQNKQIGIAQATLNSTSSTIVEFKAGSKTIPGPASTGDDSDDSSDDSDEDSAGAALHPTFSIALAGTLFTAVSMMMSVL

SEQ ID NO: 90 - DNA, 1434 bp, Trichoderma reesei
atgcgtttcgttcagtacgtctcgctggccggcctcttcgccgctgccacagtttctgcaggcgtcgttaccgtcccctttgagaagcgcaacctcaaccccgactttgccccgtcactgctgcgtcgcgatggcagcgtgagccttgacgccatcaataacctcactggaggtggctactatgcccaattcagcgttggcacgccgcctcagaagctgagtttccttctcgataccggcagcagtgatacctgggtcaactccgtcactgcggacctctgcacagacgagttcactcagcagactgttggagaatactgtttcagacagttcaacccaaggaggagtagttcctataaggcgagcactgaagtcttcgacatcacctaccttgacggccgcaggatacgaggcaactacttcacggataccgtcaccatcaaccaggcgaacatcacgggccagaagattggcctagccctgcagtcagtccgcggcacaggcatcctgggcttgggattccgggaaaacgaggcagccgacaccaagtatcccaccgtcatcgataacctggtgtctcaaaaggtcattcctgttccggcattcagtctctacctcaacgacctgcaaactagccagggcatcctcctctttggtggtgtcgataccgacaagttccacggcggccttgccactctgccccttcagtcgctgccgccgtccattgccgagacccaggatattgtcatgtacagtgttaaccttgatggcttctcggcgtctgacgttgatacgcccgacgtcagcgccaaagccgttctcgactctggctcaacaatcaccctcctcccagatgctgtcgtgcaggaactttttgacgagtacgacgtcctcaacattcagggactccccgttccttttatcgactgcgccaaagcaaacatcaaggatgccaccttcaacttcaaattcgacggcaagacgatcaaggtgcccattgacgaaatggtcttgaacaacctcgccgcggcttcagacgagattatgtcggatccctccttgagcaagtttttcaagggttggagcggagtgtgcacctttggcatgggctcgaccaagacctttggcatccagtctgacgagtttgtcctgctgggcgacaccttcttgcggtccgcctatgtcgtctacgacctgcagaacaagcagattggcattgcccaggcgacgctcaactcgaccagcagcaccattgtcgagttcaaggcgggctccaagaccattcccggccctgcttccacgggcgacgactctgacgattcgtcggacgattcagatgaagattctgccggtgctgctcttcatcctacattttctattgctctggccggcaccttgttcacggccgtttccatgatgatgagtgtactatag

SEQ ID NO: 91 - protein, 605 aa, Trichoderma reesei
MAATRDPTTLSNYGAWRTKHTSASFNIDFDNKRLVGSVVLQLESQTDKQSTEIVLDSRFVKVSSVAVDGAAAQWELKPHSDPFGAPLHIQVPHGAAKGDVVRVAIELETTSKCTALQWLTPAQTSNKKHPYMFSQCQAINARSIFPCQDTPDVKSTISFKFTSTLPVVASGVAVGDHTATPGVEKVYEFEQKVPIPSYLFAVASGDIVAAPIGSRSKVVTGPNELKGCQWELERDMEKFLEIAESIVFPYRWGEYNVLVLPPSFPYGGMENPIYTFATPTIISGDRQNVDVIAHELAHSWSGNLVSNASWEHFWLNEGWTVYLERRIEAAVHGEPQFDFSSIIGWKALEDAVAHFGKDHEYTKLIISHDNVDPEDVYSTVAYEKGFHFLYYLDRLVGRDNFNKFIPHYFTKWAGKSLDSFEFRDTFVDFFNNLGDEEVKQKVATIDWEGRFYTPGLPPKPEFDTTLASQCYELAEKWKDASYEPSPKDVEGFSSNQKIVFLEKLQQFEPLSTDRAQLLGKVYDLLNTQNVELKFAYLQLALKANDASSYQTTADLLGKVGRMKFVRPLFRSLNKVDRNLALETFAKNKDFYHPICRGMVEKDLGV

SEQ ID NO: 92 - DNA, 1818 bp, Trichoderma reesei
atggccgccactcgcgatcccaccacgctgtccaactacggcgcctggcgcaccaagcacaccagcgccagcttcaacatcgactttgacaacaagcgcctcgtgggatccgtcgtcctgcagctcgagagccagacggacaagcagagcaccgagatcgtcctcgactcgcgcttcgtcaaggtctcgtccgtcgccgtcgacggtgccgccgcccagtgggagctcaagccgcactcggacccctttggcgcgccgctgcacatccaggtgccccatggcgcggccaagggcgacgtcgtccgcgtggccattgagctcgagacgaccagcaagtgcaccgccctgcagtggctgacgcccgcccaaacctccaacaagaagcacccctacatgttctcccagtgccaggccatcaacgcccgctccatcttcccctgccaggacacgcccgacgtcaagtccaccatcagcttcaagttcacgtcgacgctgcccgtcgtcgccagcggcgtcgcggtgggcgaccacacggccactcccggcgtcgagaaggtgtacgagtttgagcaaaaggtgcccattccctcgtacctgttcgccgttgcctctggcgatatcgtcgccgcccccatcggctcccgcagcaaggttgtgaccggccccaacgagctcaagggctgccagtgggagctggagcgggacatggagaagttcctggaaatcgccgagagcatcgtcttcccttacagatggggagagtacaacgtgctcgtgctgccccccagcttcccatacggaggcatggagaaccccatctatacttttgctacccccacaatcatcagcggcgacaggcagaacgtggatgtcattgctcacgagcttgcccacagctggagcggcaacctggtgtccaatgccagctgggagcacttctggctgaatgagggctggacggtgtatctggagcgacgaatcgaggctgcggttcacggcgagccccaatttgacttttcatccatcattggctggaaggcccttgaggatgccgttgcacactttggcaaggaccacgagtacaccaagctcatcatcagccacgacaacgtggaccccgaggacgtctacagcaccgttgcctacgaaaagggcttccacttcctctactacctggaccgcctcgttggccgcgacaacttcaacaagttcatcccccactacttcacaaagtgggctggcaagtctctcgactccttcgagttcagggacacatttgtagacttcttcaacaaccttggcgacgaagaggtcaagcaaaaggttgccaccattgactgggagggcagattctatacccctggcctgcctcccaagcccgagtttgacaccacgcttgccagccagtgctacgagctggctgagaagtggaaggatgcttcctatgagcccagccccaaggatgttgaaggcttctcttccaaccaaaagattgtcttcctcgagaagctgcagcagtttgagcccctgagcaccgaccgagcccagctcctcggcaaggtctacgatctgctcaacacccaaaacgtcgagctcaagtttgcctacctccagctcgccctcaaggccaacgacgccagcagctaccagacgacggccgatttgctcggaaaggtcggccggatgaagtttgtgcgacccttgttccgctccctgaacaaggttgaccggaacctcgccctggagacgtttgccaagaacaaggacttttaccaccccatctgcaggggtatggtggaaaaggatcttggtgtctag

SEQ ID NO: 93 - protein, 471 aa, Trichoderma reesei
MASRRLALNLSQGLRARSGLSGLRRGFATPSTVGKTQTTTLKNGLTVATEYSPWAQTSTVGMWIDAGSRAETNETNGTAHFLEHLAFKGTAKRSQHQLELEIENMGGHLNAYTSRENTVYFAKAFNSDIPQTVDILADILQNSKLEQSAIERERDVILRESEEVEKQVEEVVFDHLHATAFQHQPLGRTILGPRQNIRDITRTELVNYIKNNYTADRMVLAAAGGVPHEQLVELAEKHFSGLASHGPETEAYVLSKQKADFIGSDVRVRDDTMPTANVAIAVEGVSWNSDDYYTALVAQAIVGNYDKAMGNAPHQGGKLSGYVHKHDLANSFMSFSTSYSDTGLWGIYLVTDNATRLDDLVHFAIREWMRLCYNVSEAEVERAKAQLKASILLSLDGTTAVAEDIGRQLITTGRRASPGEIERKIDAITDKDVTDFANRYLWDKDIAISAVGKIEALFDYQRLRNTMKPKF

SEQ ID NO: 94 - DNA, 1416 bp, Trichoderma reesei
atggcgtcccgcagattagctctgaacctgtcgcaaggcctgcgagcccgttccggcctgtcaggcttgcgccggggctttgctacgccctccaccgtcggcaagacgcagacgacgacgctcaagaacggcctgactgtcgctactgaatactcaccatgggctcagacctcgaccgtcggcatgtggatcgacgccggctcccgtgctgagaccaacgagaccaacggcactgcccacttcctcgagcacctggccttcaagggcaccgcaaagcgatcacagcaccaattggaactcgagattgagaacatgggtggtcacctcaacgcctacacctcgcgcgagaacaccgtctactttgccaaggccttcaactccgatattccccagaccgtcgacatcctggccgatattctgcagaactccaagctcgagcagtccgccatcgagcgcgagcgcgacgtcattctccgagagtccgaggaggtcgagaagcaggttgaggaggttgtcttcgaccacctgcacgccactgccttccagcaccagccccttggccgcaccatcctcggcccccgccagaacatccgtgacattacccgcaccgagctcgtcaactacatcaagaacaactacaccgccgaccgcatggttctcgccgctgccggtggcgttccccacgagcagctggtcgagctcgccgagaagcacttctccggccttgccagccacggacccgagaccgaggcctatgtcctgtctaagcagaaggccgacttcattggctctgacgtgcgtgtccgcgacgacaccatgcccactgccaacgtcgccattgctgttgagggtgtcagctggaactctgatgactactacactgctctcgtcgctcaggccattgttggcaactacgacaaggccatgggcaacgcccctcaccagggcggcaagctcagcggctacgttcacaagcacgacctggccaacagcttcatgagcttctccaccagctacagcgacactggtctctggggcatctacctcgtcaccgataacgccacccgcctcgacgacctcgtccacttcgccatccgtgagtggatgcgtctctgctacaacgtcagcgaagccgaggttgagcgcgccaaggcccagctgaaggcctccatcctgctgtccctggacggcaccaccgccgttgccgaggacattggccgccagctcatcaccactggccgccgcgccagccccggcgagattgagcgcaagatcgacgccatcaccgacaaggatgtcaccgacttcgccaaccgatacctctgggacaaggacattgccatcagcgctgttggaaagattgaggctctgtttgactaccagcgactgcggaacaccatgaagcccaagttttaa

SEQ ID NO: 95 - protein, 462 aa, Trichoderma reesei
MAFWVVGGGNPLGDAASSSRGQVAAYIKGEALGSNGKRRIFADGSASACSEAGCYGITKRPRLDDWGRVIGFHGKGHHAAGCEHERSGLVSPAAAAAEAEAASIHVKNLAFLVIREREPSPPATPPPQKGLSPDLRPGFHGLAPSYAPAPMERTQSGLSISSDTSAVDARDSDLEPLLSDLAAARLVRRHVANNCRWKHRDSQHGRILKALINPKSREADFPLDNDALRSIFSAANELFFANKLTQRVTWDWSHPASAQYESHIVGTTALRRSVRLGGYETLIVLSSPILKDTKYNRRLLISTFLHEMIHSFLFITCGIKARYQGGHTEGFRQIAEIIDDWVGAEHLRLRDMEADLERFIDDDGPPSTAIRASIEGGFSHSNHYYYGSNGNGNGNGNNHIHHSHSHNPRTTWPISEWQHAENHDYRLIEAPQPYTRYPSNYDEWEWHDREGFPAQTAHLYHH

SEQ ID NO: 96 - DNA, 1389 bp, Trichoderma reesei
atggccttctgggtggttggcgggggaaatccgcttggtgacgctgcctcatctagtcgaggtcaggtggcggcttacatcaagggcgaggccctggggtccaatggcaagcggaggatctttgcagatggcagcgcgtctgcctgcagcgaggcgggctgctacggcatcaccaagaggccgcggctggacgactgggggcgcgtcattggcttccacggcaagggccatcatgcggccggctgcgagcacgagcgttccggccttgtgagccctgctgccgccgctgccgaggccgaggccgcctcgatccacgtcaagaacctcgcctttctcgtcatccgcgagcgggagccctctccgcctgcgacgccgcccccacagaagggcctgtctccggacctccgccccgggttccatggcctcgccccgtcctatgccccggccccgatggaacgcacccaatcgggcctctccatctcgtccgacacgtctgccgtcgacgcccgcgacagtgacctcgagccgctgctgagtgatctcgccgcggcccggctggtgcggcgacatgtggccaacaactgtcgatggaagcaccgcgactcgcagcacggccgcatcctcaaggccctcatcaaccccaagtcgcgagaggccgacttccccctcgacaacgacgccctccgcagcatcttctcggccgccaacgagctcttcttcgccaacaagctgacgcagagggtcacctgggactggagccacccggccagcgcgcagtacgagagccacattgtcggcaccacggccctgcgccggagtgttcgtctgggcggctatgagacgctcattgtgctgtcgtcacccattctcaaggacacaaagtacaaccgccggcttctcatctccacgttcttgcacgagatgatccacagctttctcttcatcacgtgtggcatcaaggctcgataccaaggtggccatacggaaggctttcggcagattgccgagatcatcgatgactgggttggggctgagcaccttcggctgcgggacatggaggccgatctcgagcgcttcatcgatgacgacgggcctccttccacggctattcgagcttctatagagggcgggttttcccattcgaaccattattactacggcagcaatggcaatggcaatggcaatggcaacaaccacatccaccacagccatagccacaaccctcgcacgacatggcccatctccgagtggcagcacgctgagaaccacgactatcgactcattgaagcgccgcagccctacacacgatatccgagcaactacgatgagtgggagtggcatgacagggagggcttcccagctcaaaccgcccacttatatcatcattaa

SEQ ID NO: 97 - protein, 884 aa, Trichoderma reesei; identical to SEQ ID NO: 39

SEQ ID NO: 98 - DNA, 2655 bp, Trichoderma reesei; identical to SEQ ID NO: 40

SEQ ID NO: 99 - protein, 714 aa, Trichoderma reesei
AHSLKRSPLDYVSVIDNVKIHTPSGRVHAHSAFDLTFSIHDGEDKFRLSLHPNHDILHDDLEVTYLDSEGKVKSVEKVERGEHKVYRGDAYVERPGEDGWSLGGWARITMHRDGKHPVFDGSFRIDGDDHHIHTGSKYINIKHEDDPLPSDWPEKDHDEVMVVWRDSDVRGSLDRGELKRDVSKPSECISDSLTFNNQFDLELKRSTGLRGIDPRSLFGRQSIDGGSNGGGSGQDLISSIGQTAGCPTTKKVALVGIATDCTYWNGFNSSEELRKNVIGMVNQASQVYESAFKISLGIRNLTVLDRGCPGAPSAATPWNVGCSDNTTISDRLNLFSAWRGRSLDSNAYWSLLTTCPTDAAVGLAWRSQVCRQGSGTSSDGQGNNETVAGANVVVRTSTEWQVFAHESGHTFGAVHDCTSSTCPVDPSSQACCPLSAGSCDAGGRFIMNPSTGTGITQFSACSVGNICSSLKAAALSSCLTDNKNVPTITGSQCGNGIVEEGEECDCGGTQGCGNNTCCDARTCKFKNNAVCDPSNEDCCNDQCQFASSSTVCRPSTGECDVQETCPGDAARCPDDQHKSDGDGCGSGDGLRCASGQCTSRDRQCQVAVGTSADNSSTTACPDTRDSCTVSCYTGQSAFGQRQCLLFGQNFIDGTPCGSGGHCSNGECEGTSTAGEIRDWITSHKEIVIPIAVVVGVLLIIVVVSGIISCCRRAR

SEQ ID NO: 100 - DNA, 2142 bp, Trichoderma reesei
gcccattcgttgaagagaagtcctttggactacgtctctgtcattgacaatgtcaagatacacacgccatcaggccgagtccatgcgcattctgccttcgacctcacattctctattcacgatggagaggataaattccgactgtcgctgcacccgaaccacgacatcctccacgacgacttggaggtgacgtatctcgactccgaaggaaaggtcaagtcggtagagaaagtagagcgcggggaacacaaggtctatcgaggcgatgcctacgtcgagcggcctggagaggatggctggtcgctgggcggctgggcgagaattacgatgcaccgtgacggcaagcatccggtgtttgacggctcttttcgcatcgatggcgacgatcaccacatccacaccggctccaagtatatcaacatcaagcacgaggacgatcccttgccttcagactggccggaaaaggaccatgatgaagtcatggttgtatggcgcgactctgatgtccgaggctcgctcgaccgtggggaactcaagcgcgacgtctcgaagccgtcagagtgcatctcggactcgttaaccttcaacaaccaattcgatctggagctcaagcgatcaactgggctccgagggattgaccccaggagtctctttggtcgccagtccatcgacggaggctccaacggtgggggtagtggccaggaccttatttccagcattggacaaacggctggatgccctacgacgaaaaaggtggccttggtcggcattgcgaccgactgtacctactggaacggcttcaactcatccgaggaacttaggaagaacgtcatcggcatggtgaaccaagcctcccaggtgtacgagagtgcattcaagatttcactgggcatcaggaacttgaccgtcctcgaccgcgggtgcccaggcgccccctctgccgccacgccctggaatgtaggctgctcagacaacaccaccattagcgatcgacttaacctcttctccgcctggcgcggcaggtccctcgacagcaacgcctactggagtctgctgaccacctgtcccacagacgccgccgttgggctggcctggaggagccaggtctgccgtcaggggtcaggaaccagctcggacggtcaaggtaacaacgagaccgtggctggcgccaacgtcgttgtgcgtacctcgacggaatggcaggtgtttgcccacgagtcgggacacacctttggagccgtccacgactgcacaagctctacgtgccccgttgacccctcctcgcaggcatgttgcccgctctctgctggcagttgcgatgccggtggacgattcatcatgaacccgtcgacaggcaccggcatcacccagttctccgcctgcagcgtgggcaacatttgctccagcctcaaggcggcggcgctgtcgagctgcttgaccgacaacaagaacgtgcccactatcaccggcagccagtgcggcaacggcatcgttgaagaaggcgaggaatgcgactgcggcggcacccagggctgcgggaacaacacgtgctgcgacgccaggacctgcaaattcaagaacaatgccgtatgcgacccgtccaacgaagattgctgcaatgaccagtgccagttcgcgtcctcttcgacagtatgccgccccagcaccggcgagtgcgacgttcaggagacgtgccccggcgacgcagccaggtgccccgacgaccagcacaagtccgacggcgatgggtgcggcagtggcgacggcctccggtgtgcttcgggtcagtgcacctctcgcgacaggcagtgccaggtggccgttggcacctcggccgataacagctcgaccacggcatgcccagacacccgagacagctgcaccgtttcctgctatactgggcaatcagcctttgggcagcgccagtgcctgttgtttgggcaaaacttcatcgacggcacaccctgcggctctggcggtcactgctccaacggagaatgcgagggcacgtccacggccggagagattcgggactggatcaccagccacaaggagattgtcattcccattgccgtcgtcgtcggcgtcctgcttattatcgtggtcgtaagtggcatcatcagctgctgccgccgggcaaga

SEQ ID NO: 101 - protein, 1025 aa, Trichoderma reesei
MERVPAPVKAEAQGPSRPSSVVLLTDKLEKPSIDEREYRVIRLENGLEALLAHDPEADKASAALDVNVGNYSDEAEMPGMAHAVEHLLFMGTKKFPIENEYSQYLSANSGHSNAYTASTSTNYYFEVAAKPANGQNPSDANPSPLRGALDRFAQFFIEPLFLSSTLDRELQAVDSENKKNLQNDTWRIHQLAKSLSNPKHPFCHFSTGNLEVLKTIPESKGINVRDKFIEFHAKHYSANRMKLVILGREPLDVLQKWTVEFFSDIVNKNLPPNRWTEEPPFRESDIGVQFFAKPVMDTRELHLFFPFLDEEHLYETQPGRYCSHLIGHEGPGSIMSYIKNKGWANGLSAGASPICPGTPGVFEVQIRLTEEGLKVYPQIVNVFFQYIALLRETPPQEWIFQEQKIMADIEFKYREKAPASRFTSRVSSVMQKPLPREWLLSGYSLMRTFDADLIQQALAKFRPDNLRLCVVSQTYPGTWDKKEKWYGTEYRYERIPKDQMEDWKRAMETPSQSRLSELHLPHKNAFIPNRLEVEKKEVSEPALAPRILRNDEAARTWWKKDDTFWVPKANVIVVLNIPLVNASSQSYVKAKLFTELVRDALEEYSYDATLAGLEYTVSLDIRGLCIEVSGYNDKLPVLLEQVTATLRDLPIKDDRFTVVKERVTRNYDNWQLHSAYQQSGDYTSWLNAEHDSLVEELAVELREVTVDDVREFQRQLLAQMHIEVYAHGNMNKGDALRATDTVLSALKPRVLPKSQWPIIRSLILPPGSNFVYKKTLKDPANVNHCVETCLYIGEKGDRQTRAKTLLLDQMIHEPAFDQLRTKEQLGYIVFTNMRPFVTTYGFRIMIQSDRTPDYLDKRIEAFLVLFGEMLKNMTEDDFEGHKRSLINKRLEKLRNLDQETNRHWAQISSEYYDFEQAHQDAAHVKPITKADMISFFDKYFSPFSSSRARLSVHLCARGSDERDSKELGLPQTAPELLETPSNIASAVDSAVEITDGRLYKAGLRASSGARPVKDIAEFEETDPKL

SEQ ID NO: 102 - DNA, 3078 bp, Trichoderma reesei
atggagcgagtgccggcgccggtcaaggctgaggcccaaggccccagtcgcccatcgtcggttgtgctcctgaccgacaagctggagaagccgtcgatagacgagcgcgagtacagggtcatccgcctggagaacgggctcgaggctctgctggcgcacgatccggaggcggacaaggccagcgcggcgcttgacgtcaacgtgggcaactacagtgacgaggctgagatgcctggcatggcacacgcagttgaacatctcttgttcatgggcacgaaaaagttccccatcgagaacgagtacagccaatacctgtctgcaaactccggccactccaatgcgtatacagcctctacgtcgaccaattactacttcgaggtggcggccaagccagccaatggccaaaatccgtcagatgccaacccctcgcctctgcgcggggccctcgaccgctttgcgcagttcttcattgagccgctcttcttgtccagcactttggacagggagctccaggccgtcgactcggagaacaagaagaacctgcagaatgacacctggcgcatccaccagctcgccaagtctctgtcgaacccgaagcaccctttctgccacttctctaccggcaacctggaggtgctcaagaccatcccggagtccaaggggatcaatgtcagagacaagttcatcgagttccatgccaagcactactctgccaatcgcatgaagctcgtcattctgggccgtgagccccttgacgtcctccagaaatggaccgtcgagttcttctccgacattgtcaacaagaatctgcctcccaacagatggacagaggagcctccgttccgcgagagcgacattggtgtgcaattcttcgcgaagccagtcatggacaccagggagctgcacttgttcttcccattccttgacgaggagcacctgtacgaaacacagcctggtcgatactgctctcacctcattggccacgagggacccggcagcatcatgtcatatatcaaaaacaagggctgggccaatggtctctctgccggtgcttctccgatctgccccggcacgcccggtgtctttgaggtccagatccgactgacggaagagggcctgaaagtctatccccaaattgtcaacgtctttttccagtacattgctctcctgcgcgaaacgcctcctcaagaatggattttccaggagcaaaagatcatggccgacatcgaattcaagtacagagaaaaggctcccgcgagccggttcacgagcagagtcagctccgtgatgcagaagccgttgccgcgagagtggttgttgagtggctacagccttatgcgcacctttgacgcagacctcatccagcaggctctggccaagttccgcccagacaatcttcgtctctgcgtggtttcacaaacctacccgggcacctgggacaagaaggagaagtggtatggtaccgagtatagatacgagaggattccaaaggaccagatggaggattggaagcgcgccatggagactccaagccagagccggctgtcagagctacatctgcctcacaagaacgccttcatacccaacaggctcgaggtggagaagaaggaagtgtcggagcccgcgttggcgcctcggatcctgcgaaacgatgaagcggctcgaacttggtggaaaaaggacgacactttctgggtgcccaaggccaatgtcattgtggtcctcaacattccactcgtgaacgcctcctctcagagctacgtcaaggccaagctgtttacggagctggtgcgcgatgcgttggaagagtactcatacgatgcaacgcttgcaggactcgagtacacggtgtccctcgacatccgaggcctgtgcatcgaagtctcgggatacaatgacaagcttcccgttcttcttgagcaagtcaccgccacgctacgcgatctcccaatcaaggacgatcgcttcaccgtcgtcaaggagcgcgttactcgtaactacgacaattggcagcttcattcggcgtatcaacaatccggggattatacgtcgtggctcaacgctgagcatgactctctggtcgaagagcttgccgtggaactgcgagaagtcacggtagacgatgtgcgggaattccagaggcaactgctggcccagatgcacatcgaggtttacgcacatggcaatatgaacaagggcgatgcgctgagagcaacggatacggttctgtctgccttgaagcctcgcgtcttgcccaagtctcagtggcccatcatccgttcgctcatcctgccgcccgggtcaaacttcgtctacaagaagacgctgaaagaccctgcaaatgtcaaccactgcgtcgagacatgcctctacattggcgagaagggcgaccgacagacgcgcgcaaagactctgttgttggaccagatgatccacgagcccgcattcgaccagctgaggacaaaagagcagctaggatacattgtcttcacgaatatgcggccctttgtcaccacatatggcttccgcatcatgatccagagcgacagaactcccgactacctcgacaagcgcatcgaggccttcttggtcctgttcggtgagatgctcaagaacatgacggaagacgatttcgagggccacaagcggagtttgatcaacaagaggctcgaaaagctgcgcaacctcgaccaagagaccaacaggcattgggcccaaatttccagcgagtattatgactttgagcaagcccaccaagatgcagcccacgtgaaaccaattacaaaggccgacatgattagcttctttgacaaatactttagcccattctcgagcagccgagctcgtctttcggttcacttgtgtgctaggggttcggacgagcgggattcgaaggagctggggcttccccagacggccccggaactcttggaaacgccaagcaacattgcatccgcggtagactcggccgtggagattaccgacgggcgactgtacaaggccggactgcgggcaagctctggagctcgccccgtcaaggacattgccgaattcgaagagacggaccccaagctttga

SEQ ID NO: 103 - protein, 541 aa, Trichoderma reesei
MRSVVALSMAAVAQASTFQIGTIHEKSAPVLSNVEANAIPDAYIIKFKDHVGEDDASKHHDWIQSIHTNVEQERLELRKRSNVFGADDVFDGLKHTFKIGDGFKGYAGHFHESVIEQVRNHPDVEYIERDSIVHTMLPLESKDSIIVEDSCNGETEKQAPWGLARISHRETLNFGSFNKYLYTADGGEGVDAYVIDTGTNIEHVDFEGRAKWGKTIPAGDEDEDGNGHGTHCSGTVAGKKYGVAKKAHVYAVKVLRSNGSGTMSDVVKGVEYAALSHIEQVKKAKKGKRKGFKGSVANMSLGGGKTQALDAAVNAAVRAGVHFAVAAGNDNADACNYSPAAATEPLTVGASALDDSRAYFSNYGKCTDIFAPGLSIQSTWIGSKYAVNTISGTSMASPHICGLLAYYLSLQPAGDSEFAVAPITPKKLKESVISVATKNALSDLPDSDTPNLLAWNGGGCSNFSQIVEAGSYTVKPKQNKQAKLPSTIEELEEAIEGDFEVVSGEIVKGAKSFGSKAEKFAKKIHDLVEEEIEEFISELSE

SEQ ID NO: 104 - DNA, 1626 bp, Trichoderma reesei
atgcggtccgttgtcgccctctccatggcggccgttgcccaggccagcacattccagattggcaccatccacgagaagtcggcccccgtgctgagcaacgtcgaggccaacgccatccccgatgcctacatcatcaagttcaaggaccacgtgggtgaggatgatgcctccaagcaccacgactggatccagagcatccacacaaacgttgagcaggagcgccttgagctccgcaagcgaagcaacgtctttggcgccgacgacgtctttgacggtctgaagcacactttcaagattggcgacggcttcaagggctacgccggtcacttccacgagtctgtcattgagcaggtccggaaccaccctgacgttgagtacatcgagcgcgacagcattgtgcacaccatgcttcccctcgagtccaaggacagcatcatcgttgaggactcgtgcaacggcgagacggagaagcaggctccctggggtcttgcccgtatctctcaccgagagacgctcaactttggctccttcaacaagtacctctacaccgctgatggtggtgagggtgttgatgcctatgtcattgacaccggcaccaacatcgagcacgtcgactttgagggtcgtgccaagtggggcaagaccatccctgccggcgatgaggacgaggacggcaacggccacggcactcactgctctggtaccgttgctggtaagaagtacggtgttgccaagaaggcccacgtctacgccgtcaaggtgctccgatccaacggatccggcaccatgtctgacgtcgtcaagggcgtcgagtacgctgctctctcccacattgagcaggtgaagaaggccaagaagggcaagcggaagggcttcaagggctccgtcgccaacatgtccctcggtggtggcaagacccaggctcttgacgctgccgtcaacgccgccgtccgcgccggtgtccactttgccgttgctgccggcaacgacaacgctgatgcttgcaactactcccccgctgccgccactgagcccctcaccgtcggtgcttctgctctcgatgacagccgtgcttacttctccaactacggcaagtgcactgacatcttcgcccctggtctgagcatccagtccacctggattggctccaagtatgccgtcaacaccatctctggtacctccatggcctctcctcacatctgcggtctcctggcctactacctgtctctccagcccgctggtgactctgagttcgctgttgcccccatcacccccaagaagctcaaggagagcgtcatctctgtcgccaccaagaacgccctctctgacctgcccgactctgacacccccaacctgctcgcctggaacggcggtggctgcagcaacttctcccagattgtcgaggccggcagctacactgtcaagcccaagcagaacaagcaggccaagctccccagcaccattgaggagctcgaggaggccatcgagggtgactttgaggtcgtctctggcgagatcgtcaagggtgccaagagctttggctccaaggcggagaagtttgccaagaagatccacgatctcgtcgaggaggagattgaggagttcatctctgagctctccgagtaa

SEQ ID NO: 105 - protein, 555 aa, Trichoderma reesei
MRACLLFLGITALATAIPALKPPHGSPDRAHTTQLAKVSIALQPECRELLEQALHHLSDPSSPRYGRYLGREEAKALLRPRREATAAVKRWLARAGVPAHDVLTDGQFIHVRTLAEKAQALLGFEYNSTLGSQTIAISTLPGKIRKHVMTVQYVPLWTEADWEECKTIITPSCLKRLYHVDSYRAKYESSSLFGIVGFSGQAAQHDELDKFLHDFAPYSTNANFSIESVNGGQSPQGMNEPASEANGDVQYAVAMGYHVPVRYYAVGGENHDIIPDLDLVDTTEEYLEPFLEFASHLLDLDDDELPRVVSISYGANEQLFPRSYAHQVCDMFGQLGARGVSIVVAAGDLGPGVSCQSNDGSARPKFIPSFPATCPYVTSVGSTRGIMPEVAASFSSGGFSDYFARPAWQDRAVGAYLGAHGEEWEGFYNPAGRGFPDVAAQGVNFRFRAHGNESLSSGTSLSSPVFAALIALLNDHRSKSGMPPMGFLNPWIYTVGSHAFTDIIEARSEGCPGQSVEYLASPYIPNAGWSAVPGWDPVTGWGTPLFDRMLNLSLV

SEQ ID NO: 106 - DNA, 1668 bp, Trichoderma reesei
atgagggcctgcctgctcttcctgggcatcaccgccctggccacagcaatcccagctttgaaaccaccccatgggagtccagacagagcccacacaacccagcttgccaaagtctccatcgccctgcagcccgagtgtcgagagctcctcgagcaagccctccaccacctctccgacccctcaagcccacggtacggccgttaccttggccgcgaagaagccaaagctctgctccgccctcgacgagaggccacggccgccgtcaagagatggctggccagggctggtgttcctgctcatgatgttttgactgatgggcagttcatccacgtgcggacgcttgcggagaaggctcaggctctgcttggattcgagtacaactcgacgctgggttcgcagacaatcgcaatctctacccttccaggaaagatacggaagcatgtcatgaccgttcagtatgttccgctttggacggaagcagactgggaggaatgcaagacgataatcacgcctagctgcctgaaaaggctgtatcacgtcgacagttaccgcgcaaagtatgagagcagcagtctttttggcatcgtgggcttcagcgggcaagcggctcagcacgacgaactggacaagtttctccacgattttgcgccctactctaccaacgcaaacttctccatcgagtctgtcaatggagggcagagtccccaggggatgaacgagccggcaagcgaggccaacggagatgtccagtacgccgttgccatgggctatcatgttcctgttcggtattacgcagtcggtggcgagaaccatgacattatcccagacctggacctggttgatacaacagaggagtatcttgagccgtttctcgaattcgccagccatctcctcgacctcgacgacgatgagctcccaagggtagtctccatctcgtacggcgccaacgagcagctcttcccccgatcctacgcccatcaagtctgcgacatgtttggccagctcggcgcccgcggcgtctccatcgtcgtggccgctggcgacctgggccccggcgtatcatgccaatcaaacgacggctcagcaaggccaaagttcatcccctcgtttcccgcgacgtgcccctacgtgacgagcgtggggtcgacgcgcggcatcatgcccgaggtggcggcgagcttttcgtcgggcggcttctcggattattttgctcgtccggcgtggcaggatagagcggtgggcgcgtacctcggggcgcatggcgaggagtgggagggcttttataatcctgctgggagagggtttcctgatgttgctgctcagggggtgaattttcggtttagagcccatgggaatgagagcttgagttccgggacgagcctctcctcgccggtgtttgccgctctcattgctctgctcaacgaccatcgatctaagagcggcatgccgcccatgggattcctgaatccttggatctacaccgtcggcagtcacgccttcacagacatcatcgaggccaggtcggagggatgcccaggacagagcgtcgaatatctcgcatcgccctatatccccaacgcgggctggagcgccgtgcctggatgggatccggtgacgggttggggcacgccgctgtttgacaggatgctgaatctgtctttggtgtag

SEQ ID NO: 107 - protein, 885 aa, Trichoderma reesei
MCRARAGLEGGSAAAPKRELLPANVVPRHYHVTVEPDFDKLTYNGSVVIDLDVAETSSFISLNTLELEIHGAKLSSGGQVVSATPAISYDENSQVTKFDFDGSHTLEKNSKVQLAIDFTGQLNDKMAGFYRSKYKRPDGTEGILASTQMEPTDARRAFPCFDEPALKAKFTVTLVADKNLTCLSNMDVASETEVQSKITGGTRKAVTFNPSPLMSTYLVAFVVGELNYIESRDFRVPVRVYAPPGHDIEHGRFSVDLAAKTLAFYEKAFGIDFPLPKMDQVAIPDFAQGAMENWGLVTYRVVDLMLDEKASGAATKQRVAEVVQHELAHQWFGNLVTMDWWEGLWLNEGFATWASWYSCNIFYPEWRVWQTYVTDDLQSALSLDSLRSSHPIEVPVGRADEINQIFDAISYSKGSCVLRMISTYLGEEKFLEGVRKYLKKYAYGNTQTSDLWDSLAEVSGKPVHEVMTAWTKSVGYPVLTVTEKEGENAIHVKQNRFLRTGDATPEEDKVLYPVFLGLRTKDGVDETLALKEREKDFPVPSLDFFKLNANHTGIYRTLYTPSRLEKLGQAAKEGLLTTEDRAGMIADAAALSSSGYGKTSGFLNLLKGFDAETEFVVWNEIISRLGSIQAAWLFEDQAVRNGIRAFLRELVSAKAHQLGWEFSDSDGHVEQQFKATLFGSAGLSGDETIISASKEMFAKFIAGDKSAIHPNIRKSVFAIALKYGGKEEYESIIKLYHESTNSDERNTCLRSLGRAKDPELIQRTLSLLLNGEVRDQDIYMPASGLRTHPEGIEALFNWMTENWEELYKRHPPNLPMLPAMVSLLTSGFTKPEQLARVEKFFSDKNTNGYDQSLAQSKDSIRSKISWVERDGQDVADWVKTNGYLE

SEQ ID NO: 108 - DNA, 2658 bp, Trichoderma reesei
atgtgtcgagccagggctggtctcgagggcggctcggccgccgctccgaagcgcgagctgctccctgccaacgtcgtgcctcgccactaccacgttaccgtcgagcccgacttcgacaagctcacttacaacggctccgtcgtcattgacctcgatgttgccgagacgtcgagcttcatctccctcaacacgctcgagctcgagattcacggcgcaaagctctcctctggtggccaggttgttagtgccacgcctgccatttcctacgatgagaacagccaagtgaccaagttcgacttcgacggctcccacaccctcgaaaagaactccaaggtgcagctggcaatcgacttcaccggccagctcaacgacaagatggccggcttctaccgctccaagtacaagcgaccggacggcaccgagggcatcctggcgagcacccagatggagcccaccgacgcccgcagagcgttcccctgcttcgacgagccggctctcaaggccaagttcaccgtcacgctggttgccgacaagaacctgacgtgcctgagcaacatggacgttgcctccgagaccgaggtccagtccaagatcactggcggaaccaggaaagccgtcaccttcaacccctctcccctcatgtccacctacctcgtcgccttcgttgtcggcgagctcaactacatcgagtcgcgcgacttccgcgtccccgtgcgagtgtatgctcccccgggccacgatatcgagcacggccgcttctccgtcgaccttgctgcaaagacgctcgcattctacgagaaggcttttggcatcgacttccccctgcccaagatggaccaagttgccatccccgactttgcccagggagccatggagaactggggtctggtcacgtacagagttgtggacctgatgctggatgaaaaggcaagcggtgccgctaccaagcagcgcgtggccgaggttgtccagcacgagctggcccaccagtggttcggaaacctggtaacgatggactggtgggagggtctctggctcaacgagggtttcgccacctgggcctcgtggtactcatgcaacatcttttaccccgaatggcgtgtctggcagacgtacgtcactgacgacctgcagtccgcgctgtcgctggactccctccgtagcagccaccccattgaggttcccgtgggccgtgctgacgagattaaccaaatcttcgatgccatctcctactccaagggatcttgtgtgctccgcatgatctccacatacttgggagaggagaagttcctggagggcgttcgcaagtacctgaagaagtatgcctacggcaacacccagactagcgacctgtgggactcgttggccgaggtcagcgggaagcctgtgcacgaggtcatgactgcgtggaccaagagcgtcgggtatcccgtccttacggtcaccgagaaggagggcgagaatgcgatccacgtcaagcagaaccgcttcctccgcaccggcgacgcaaccccggaggaagacaaggtcctgtaccccgtcttcttgggcctgaggaccaaggacggcgtcgatgagacgctggccctgaaggagcgcgagaaggacttccccgtgcccagcctcgacttcttcaagctcaacgccaaccacactggaatctaccgaacgctctacacccccagccgcctggagaagctgggccaggccgcaaaggagggtctcttgacgacggaggacagggcaggcatgattgccgatgctgctgcgctctccagctctggttacggcaagacctctggcttcctcaacctcctaaagggcttcgatgccgagacggagtttgtcgtctggaacgagatcatctcccgcctcggatcgatccaggctgcctggctgtttgaggaccaggccgtgcgaaatggcatccgcgcattcctgagagagctcgtcagcgccaaggctcaccagctcgggtgggagttttccgactcggacggccacgttgagcagcagttcaaggccacactctttggcagcgccggcttgagcggcgacgagaccattatttctgcttccaaggaaatgtttgccaaatttatcgctggcgacaagtcggctattcaccccaacattcgcaagagtgtgtttgctattgccctcaagtatggcggcaaggaagagtacgagagcatcatcaaactgtaccatgagtcgaccaacagcgacgagcgcaacacctgcctccgatctcttggccgcgccaaggaccccgaactcatccagaggactctgtctctgctgctcaacggcgaggtccgagaccaggacatttacatgcctgcgtccggactgcgcacccaccccgagggtatcgaggcgctgttcaactggatgacggagaactgggaggagctctacaagcgacacccgcccaacctgccgatgctccccgccatggtgtcgctgctgacgtctggcttcaccaagcctgagcagctggcccgcgtcgagaagttctttagcgacaagaacaccaacggctacgatcagtcgctcgcacaaagcaaggactctatccgatccaagatttcgtgggtggagcgcgatgggcaggatgtggcggactgggtcaagacgaatggatatctggagtag

SEQ ID NO: 109 - protein, 506 aa, Trichoderma reesei
MDGRPPLDNRACVNCISKLSPSEVCQVNWHVDTDNACRLCAVRDLKPEAFTKPFCDFLRENPTIFHTVEYFKTKLRQSGYVELPARDSWADKIQPGGKYWVTRNGSSLIAFAVGKSYKPGNGVGMIAGHIDALTARLKPVSKKPTAAGYVQLGVAPYAGALNQTWWDRDLSIGGRVIVRDEKTGKTSSKLVQLDWPIAKIPTLAPHFGVGMMGQNNPETQAVPIIGLESSDGSDSELLGSTGSFVNTQPPKLVKLIAKELGITSYDSIVNWELELFDSQPATVFGLDKEFITAGRIDDKLCSWSALLGLLHSTERDSDSYIKLVALFDDEEVGSLLRQGARGNFLPLTIERLVEALNPTTYGPGLIGQTFAKSFLLSADVSHAGHPNFLGNYLPEHIPKLNVGLVVCSDSNAHMTTDAVSSAILHRVADLCGAKLQDFQIRNDSRSGGTVGPMLSSAMGVRCADAGLPQISMHSIRATTGALDPGLGVQIFKGFLDFWEQVDGEWE

SEQ ID NO: 110 - DNA, 1521 bp, Trichoderma reesei
atggacggccgcccgcctctcgacaaccgcgcctgcgtcaactgcatctccaagctgtcgcccagcgaggtctgccaggtcaactggcatgtcgacaccgacaacgcgtgccggctgtgcgccgtgcgggatctcaagcccgaggccttcaccaagcccttttgcgacttcctgcgcgaaaaccccaccatcttccacaccgtcgaatacttcaagacgaagctccgccaatccggctacgtagagctccctgcgcgcgactcctgggccgacaagatccagcccggcggcaagtactgggtcacccgcaacggcagctctctcatcgcctttgccgtcggcaagtcctacaagcccggcaacggcgttggcatgattgccggccacatcgacgccctgacagcccgactcaagcctgtcagcaagaagccaaccgcggccggctacgtccagctcggcgtcgccccctatgccggcgccctgaaccagacgtggtgggatcgagacctgagcattggcggccgcgtcattgtgcgcgatgagaagacgggcaagacgtcgagcaagctcgtccagctggactggcccattgcaaaaatccccacgctggcgccgcacttcggcgttggcatgatgggccagaacaacccggagacgcaagcggtgcccatcattggcttggaaagctccgacggctctgactccgagctgcttggctctaccggctcctttgtcaacactcagccgccgaagctggtcaagctcatcgccaaggagctgggcatcacatcatacgactccattgtcaactgggagctcgagctgttcgactcacagcctgccaccgtctttggcctggacaaggagttcatcaccgccggcagaatcgacgacaagctgtgctcgtggtccgccctcctgggccttctccactccacagagcgggactcggacagctacatcaagctggtggccctgttcgacgacgaagaggttggctcgctgctgcgacagggcgcccgaggcaacttcctccccctgaccattgagcgcctcgtcgaggctctcaaccccacgacctacggccccggcctcatcggccagacctttgccaagtcgttcctcctgtccgccgacgtctcccacgccggccaccccaacttcctcggcaactacctgcccgagcacatccccaagctcaacgtcggcctcgtcgtctgcagcgacagcaacgcccacatgaccaccgacgccgtctcctccgccatcctgcaccgcgttgccgacctctgcggcgccaagctgcaggatttccagatccgaaacgactcccgcagcggcggcaccgtgggacccatgctgtcgagcgccatgggcgtaagatgcgccgacgctggcctcccgcaaatttcaatgcattccatccgcgcgacaacgggcgcactggatcccggattgggtgtgcagatctttaagggtttccttgacttttgggagcaggttgatggcgaatgggagtaa

SEQ ID NO: 111 - protein, 910 aa, Trichoderma reesei
MAPRASDRLERSPSTDSLSSVSTTSIVFDRIQEEMEKGEVPPKARARLGYSDVYAEDPLKDEASGDAETEAFLGSTGAALQRRPMDRKLRRFLCIGAVIFAAAWLASLAVFVSTGSYKHASDVEHDPDADFRGSGKPVTLEQLYDRFWSPKQKSISWIAGPHGEDGLLLERGASGKDYLIVEDVRSAVGNATAAAAAAADETAQLAKSRTLMKHADFEFDGKTYQPQWLQPSPDQNKVLIGVAQEKVWRHSFTAIYFIFDVETQTAEPLVPSEAQARVQLAGWSPRSDSVSFTRDNNLYIRRLTGDGGIVQITKDGGPEYFYGIPDWVYEEEVFSGNSATWWSDDGKYLAFLRTNETGVPEYPVQFFISRPSGHTPPSGEESYPEVQEIKYPKAGAHNPVVDLHFYDVSKGDVFSVSTGDEFPDDDRIINNLVWAGDKVIVKQTNRVSDILKVILIDVNKRQGSTINTIDVNKIDGGWFEISHSMTYVPADPENGRPEDGYVDTVIHNGYEHIGYFTPLNNSEPIMLTSGSWEVDDAPSAVDLANNLVYFVATKESSIQRHVYSVKLDGSELKPLTNTSAEAYYRASFSSGAGFALLTYRGPKTPYQKVISTPSTTIAYDVVVEDNAELADRAKKHELPVLKYGTIDLDTGVKVNYLERRPPHWDPKKKYPILFQQYSGPGSQQVTKAFTVDFQSYVASNLGYIVVTVDPRGTGFLGRKHRVPVRSQLGLLEAQDHIAAARHFASLDYVDASRLAIWGWSYGGFTTLKTLEQDAGRTFSYGMAVAPVTDWRFYDSIYTERYMRTPQENDKGYALSSIANATALGENKRFLLMHGVADDNVHFQNSLTLLDKLDLAGVENYDVHVFPDSDHGIYFHGANRIVYDKLNNWLINAFNGEWLKVSHPKPIGKKA

SEQ ID NO: 112 - DNA, 2733 bp, Trichoderma reesei
atggcgccgcgagcctctgaccgactcgagcggtctccatcaacagactcgctgtcatccgtctcgacgaccagcatcgtcttcgaccgaatacaagaggagatggaaaagggcgaggttccacccaaggctcgcgccaggcttggctactctgacgtgtatgccgaggatcctctcaaggacgaggcttctggcgatgctgagaccgaggctttcctgggctcgaccggagctgcgctccagcgccggccaatggatcggaaactgcggcgctttctctgtataggcgccgtcatctttgctgcggcctggctcgcgtctctcgccgtcttcgtctctaccggatcgtacaagcacgcgagcgatgtggagcatgatccagacgccgactttcgaggctcaggcaaaccggtcaccttggagcagctctatgatcgcttctggtcgcccaagcaaaagtccatcagctggattgcaggccctcatggcgaggacggcctcctgctggagcgaggagcctcgggcaaggattatctcatcgtcgaggatgttcggtcagctgtgggaaacgcaactgctgccgccgccgctgctgcggacgagaccgctcagctggcaaagtctcggaccctcatgaagcatgccgacttcgagttcgatggcaaaacctaccagccccagtggctccagcccagccccgaccagaacaaggtgctgataggcgtcgcccaggagaaggtttggagacattccttcacagccatctacttcatcttcgacgtggagacgcagacggccgagcccctcgtcccctcagaagcacaagcccgagtccagctcgccggttggagccctcggagtgactcagtgtccttcacccgagacaacaacctctacatccgccgactcaccggcgatggcggcattgtccagattaccaaggacggcgggccggaatacttttacggcatccctgactgggtgtatgaagaagaggtgtttagtggaaacagtgcaacatggtggtccgacgacggcaagtatctggcgttcctccgaaccaacgaaactggcgtgcccgaataccccgtgcagttcttcatctcacgccccagcggccacactcctcccagcggcgaggagtcgtaccccgaggttcaggagatcaagtaccccaaggccggcgcgcacaacccggtggtagacctgcatttctacgacgtctccaagggcgatgtgttttcagtcagcaccggcgacgagttccccgacgatgatcgcatcatcaacaacctcgtctgggccggtgacaaggtcattgtcaagcagaccaatcgcgtcagcgacattctcaaggtgattctcatcgatgtcaacaagcgccagggaagcacaatcaacacgattgatgtcaacaagattgacggcggctggtttgaaatctcccactccatgacctacgtaccggccgaccctgagaatgggcggccagaggatgggtatgtggacacggtcattcacaatggctatgaacacattggctactttacgcccctcaacaactccgagcccatcatgctcacctccggctcgtgggaagtagacgatgctccatcggctgtggatctcgccaacaacctggtctactttgtagccaccaaagaatcttctatccagcgtcatgtatactctgtgaagctcgacgggtctgagctgaagcctctcacaaacacgtccgccgaggcctattaccgcgcctccttctcatcaggtgcaggtttcgccctgctgacctaccgcggacccaagactccgtaccagaaagtcatctctacgccctccaccaccattgcatatgatgtcgtcgtcgaggataacgctgagctcgccgatcgtgccaagaaacacgagctccccgtcttgaagtacggcacaattgatctcgacactggagtcaaggtcaactacctcgaacgccgtccgccgcactgggaccccaagaagaagtaccccattctcttccaacagtattccggccccggctcgcagcaagtcacaaaggccttcaccgtcgacttccagtcctacgtcgcctccaacctgggctacattgtcgtcaccgtcgacccccgcggcacgggcttcctcggccgcaagcaccgcgtccccgtccgctcgcagctcggcctcctcgaggcgcaggaccacatcgccgccgcccggcacttcgcctcgctcgactacgtcgacgcgtcgcgcctcgccatctggggctggtcctacggcggcttcaccacgctcaagacgctcgagcaggacgccggccggacgttttcgtacggcatggccgtcgcgcccgtcacggactggcgcttctacgacagcatctacacggagcggtacatgcgcacgccgcaggaaaacgacaaagggtacgccctgtccagcatagcgaatgccactgcgctcggggagaacaagcgcttcttgctcatgcacggcgtggccgatgacaatgtgcactttcaaaactcattgaccctgctggataagcttgatctggcgggcgtcgagaattacgacgtgcatgttttcccggacagcgatcatgggatttactttcacggggcgaaccgcatcgtatatgacaagttgaacaattggcttattaatgctttcaatggcgaatggctcaaggtctcgcatcccaagcccattggtaagaaggcctga

SEQ ID NO: 113 - protein, 463 aa, Trichoderma reesei
MVAQDFEAVLKGKYPGKSHASRVVDLIRKKDPNANGVLYLEGRMTKLLEDNDSPEPFRQRRYFYYLTGCNLADCYFTYDIQAAKSTLFIPPIDPHDVIWSGLPTTIDDALRLYDVDEVKLTTEVNATLAHLANATSSSTIYAINGQVSDHITFIGFENKDFALLKEAIEVSRVVKDEFEVAMIRKANHVSSLAHKAVVEKAKQASNEMELEAVFLERCVAKGAKNMAYHPIVASGTAAATLHYVANDAPLAGKQNLLIDAGAEWNNYAADITRTFPLNGKFTKEGREIYDIVYKMQQECIAVIKAGMYWEDAHILAHKIAIDGLLALGILKGDKDEIFKARTSQAFFPHGLGHYLGMDTHDTGGNPNRQDPDVIFQNLRLRGQVPAGGVVTVEPGVYFCKFIIDPYLENPEHSKYIDADVLAKYWDVGGVRIEDNVLVTETGYENLTTAIKEPGELEALMAAS

SEQ ID NO: 114 - DNA, 1392 bp, Trichoderma reesei
atggtcgcccaggacttcgaagccgtgctcaagggcaagtacccgggcaagtcgcacgccagccgcgtcgtcgacctgatccgcaagaaggaccccaacgccaacggcgtgctctatctcgagggccgcatgaccaagctgctcgaggacaatgactcgcccgagcccttccgccagcgccgctacttctactacctgaccggctgcaacctcgccgactgctacttcacctacgacatccaggccgccaagtcgacgctcttcatccccccgatcgacccccacgacgtcatctggtccggcctgccgaccaccatcgacgacgccctcaggctgtacgacgtcgacgaggtcaagctgacgaccgaggtcaacgcgacgctcgcccacctggccaatgccacctccagctcgaccatctacgccatcaacggccaggtgtcggaccacatcaccttcatcggcttcgagaacaaggactttgccctgctcaaggaggccattgaagtctctcgcgtcgtcaaggatgagttcgaggtggccatgatccgcaaggccaaccacgtctccagcctggcgcacaaggccgtcgtcgagaaggcgaagcaggcgtccaacgagatggagctcgaggccgtctttctggagcgctgcgttgccaagggcgcaaagaacatggcataccaccccattgttgccagcggcaccgctgcggcgacccttcactacgtcgcaaacgatgctcccttggcgggaaagcagaacctgctgattgatgccggcgccgagtggaacaactatgcagccgacatcacgcggacattccccctcaatggcaagttcaccaaggagggtcgcgagatctacgacatcgtctacaagatgcagcaggagtgcattgccgtcatcaaggccggcatgtactgggaagatgcccacatcctggcccacaagattgccatcgacggtctgttggccctgggcatcctcaagggcgacaaggacgagatcttcaaggccaggaccagccaggccttcttcccccatggcctgggccactacctgggcatggacacccacgacacgggcggcaaccccaaccgccaggatcccgacgtcatcttccagaacctgcgtctgcgcggccaggtccccgctggcggtgttgtaactgtcgagcctggtgtctacttttgcaagttcatcatcgacccctacctggaaaaccctgaacacagcaagtacattgatgccgatgtgctcgccaagtactgggacgttggcggtgtccgcatcgaggacaacgttctcgtcaccgagacgggctacgaaaacctcaccacggcaatcaaggagccgggcgagctggaggctctcatggcggctagctag

SEQ ID NO: 115 - protein, 460 aa, Trichoderma reesei
MTAKSHAILPTAGSPDYRNPSAANSHAQQPPHRPNLKKLALGASLALATIGLLYKPAFSHYQRISQHSCSKTLTVEERAHKILSTTPLIDGHVDFPLVLRGPYGNHLTGDDFTGPFENGTLKGHVDLARLRAGRAGGAFWSVYAPCPANGTDFSDDNYADSLQFTLQEIDIMKRLFAAYPDDFAHDIDSSDAIDAFRAGKLISPLGIEGLHQIANLAGNLRMFRDLGVRYATLTHNCHNKFADAALLESPFRKATPVWGGISPLGRQLVHEMNRIGMIVDLAHVSEDTMIDALGGREDWEGSKAPVIFSHSSAYGICPHPRNVKDKVLQLVKETDSLVMVNIAPQFISCIDNGNDNGVPDEDPDNATLERVVDHITYIGSRIGYDHVGIGTDFDGIGSVPKGLEDVSKYPDLIAELLRRGVSDADAAKVVGDNLIRVWKAVDAISAEMKANGAPVMEDKL

SEQ ID NO: 116 - DNA, 1383 bp, Trichoderma reesei
atgactgccaaatcacacgccatcctgcccacggcgggcagcccagactatcgcaacccgagtgccgccaacagtcacgcgcaacaaccgccgcacaggccaaacctcaagaagctcgccctgggcgcatcgctggctctcgcaaccatcggcctgctgtataagccggccttcagtcactaccagcgaatctctcagcactcgtgctccaagacgctgacagtcgaggagagggctcacaagatcctgtcgaccacgcctttgattgatggtcacgtcgacttcccgcttgttctccgtggcccgtacgggaatcatctcactggagatgacttcactggcccctttgagaatgggacgctcaagggccacgtcgacctcgctcggctgagggccggccgcgctgggggtgccttttggagcgtgtacgcgccgtgccctgcaaacggcaccgacttttcggatgacaactatgctgatagcctgcagttcacgctgcaggagattgacatcatgaagaggttattcgccgcatacccggatgactttgctcacgacattgacagctccgatgccattgacgccttccgagccgggaagctcatctcccccttgggcatcgaaggccttcatcagattgccaacctggctggcaacctgcgcatgtttcgcgacctcggcgtgcgatatgcgaccctgacgcacaactgccacaacaagtttgcagatgcagctctgctggagagcccctttcggaaagcaacccccgtctggggcggcatcagcccccttggccggcagctggttcacgagatgaatcggatcggcatgattgtcgatcttgctcacgtcagcgaagatacaatgattgatgccctcggtggcagagaagactgggaagggtccaaggcacccgtcatcttctcccacagctcggcgtacggcatctgccctcacccgcgcaacgtcaaggacaaggtgctgcagctagtcaaggagaccgactccctggtcatggtcaacattgccccccagttcatctcctgcattgacaacggcaatgacaacggcgtccccgacgaagaccctgacaacgcaaccctagaaagggttgtcgaccacatcacgtacattggaagccgcattggctatgatcatgtcggcatcggcaccgactttgacggcattggctcggtccccaagggtctggaggacgtttccaaatatcctgacctgattgccgagctcctgcgacgaggagtcagcgacgccgacgccgcaaaagtggtgggtgacaatctgatcagggtttggaaggccgtggatgccatctccgccgagatgaaggccaacggcgcgcccgtcatggaagacaagctgtag

SEQ ID NO: 117 - protein, 707 aa, Trichoderma reesei
MMKPEELKHYLADQPPSVVRLEIEKHFALLTEKQKRYAHFISKAAFAGSRIVLRQLSPESEPIFDLIITLHKSANGDWNALAKKAGVDEAELNLFLEYVAMFLGNMGNYKSFGDSKFIPRCSETTVAALAATSPEAQKFYDATKGAIFSHDDPAAMHLGFLDAGHMTTYYPDSKDITKSEIEAVSTWMEEKRLLPENTRLRKTADGFDILIASAVTSVPPEGGDIGKETEFTVENGPLKGKTIRLVYGDHAEEMKNITAYIKQAAANADNENQKNMHLAYAKSFETGSLEAFKESQRWWIKDKGPSVECNIGFIETYRDPAGVRGEWEGFASMVNQERTRAFGELVNASPSLIPLLPWGKEFEKDKFLSPDFTSLEVLTFANSGIPAGINIPNYDDIRQTEGFKNVSLGNVLSAKAPNEKIPFIREEDLAVYQANRDAAFEVQVGLHELTGHGCGKLLQETSPGVYNFDKENPPVSPVTQKPISTWYKPGQTWGSVFGPIAASYEECRAELVAMYLSCEFPVLKIFGFGDGSEDINGPAGDVLYASYLSMARAGLASLEMWDPKSQKWGQAHSQARFSILKSFLEAGDDFCKLDYTKDDLSDLTIKLDRSKILTAGRDAVAKYLQKLHVYKSTADVETGTKFYTDMSTVGLDFWGTKVRQVVLDNKQPRKVFVQANTTLDEATDSVSIKHYDATLLGMIQSWADRNL

SEQ ID NO: 118 - DNA, 2124 bp, Trichoderma reesei
atgatgaagcccgaggagctcaagcactatctggcagaccagcccccctccgtcgtgcgcctcgagattgagaagcactttgctcttctgactgagaagcagaagcgatatgctcactttatcagcaaggctgcttttgccgggtccaggattgtcctgcgccagctctccccagagtcagagcccatcttcgacttgatcatcaccctccacaagtcggccaatggtgactggaacgcgctggccaagaaggcgggcgttgacgaggccgagctgaaccttttcctcgagtatgttgccatgttcctcggcaacatgggcaactacaagagctttggcgactccaagttcatccccaggtgcagcgagacgactgtcgctgctctggccgccacatcacccgaggcccaaaagttctacgatgccaccaagggcgccatcttcagccatgacgacccggctgccatgcaccttggcttcctggacgccggccacatgacgacgtattatcccgactcaaaggacatcaccaagagcgagatcgaagctgtttcgacttggatggaggagaagaggctcttgcccgagaacaccaggttacgcaagacggctgatggtttcgacattctcattgcttctgctgtcactagcgttccccctgagggaggcgacattggcaaggaaaccgaattcactgttgagaatggccccctgaaaggcaagaccatcagacttgtgtatggcgaccacgctgaagagatgaagaacattactgcctacatcaagcaggctgcggccaatgcggacaacgagaaccaaaagaacatgcacctggcgtatgccaagtcgttcgagactggatccctcgaggcgttcaaggagagccagcgctggtggatcaaggacaagggccccagcgtcgagtgcaacattggcttcattgagacgtaccgcgaccctgccggtgttcgaggtgaatgggagggtttcgcttctatggtcaaccaggaacgcacccgtgctttcggagagctagtcaatgcctctccctctctcatcccattgctcccctggggtaaggagtttgagaaggacaagttcctttctcccgactttacgtcacttgaagttttgacgtttgcaaactctggcatcccagccggcatcaacatccccaactacgatgatatccgccaaactgaaggcttcaagaatgtgtcccttggaaacgtcctcagcgccaaggcaccgaatgagaagatccctttcattcgcgaagaagatctggccgtgtatcaggctaaccgagatgctgccttcgaggtccaagttggtcttcacgagctcacgggccacggatgcggtaagctcctgcaggagacttctcctggagtgtacaacttcgacaaggagaatcctcctgtcagccccgtcactcagaagcccatcagcacttggtacaagcctggccagacctggggctcggtttttggacccatcgccgcctcatacgaggagtgccgtgcagagctggttgctatgtacctgagctgcgagttccccgttctgaagatcttcggattcggtgacggatcagaagacatcaacggccccgctggagacgttctctatgcatcctacctctccatggcccgcgccggccttgcctctttggagatgtgggatcccaagagccagaaatggggacaggcacacagccaggctcgcttctccattctcaaatctttcctcgaggccggcgacgacttctgcaagctggactacaccaaggatgacctttctgatttgactattaagctggacaggtccaagattctcacagctggccgcgacgctgttgccaagtaccttcagaagcttcacgtttacaagtcaactgccgacgtcgagactggcaccaagttttacaccgacatgagcaccgttggcttggacttctggggtacaaaggtccgccaagtggttcttgataacaagcagccacgcaaagtctttgtccaggccaacactaccctggatgaagccacggactctgtgtcgatcaagcactacgatgctacgcttctgggaatgattcagagctgggccgacaggaacctgtaa

SEQ ID NO: 119 - protein, 690 aa, Trichoderma reesei
MTITAQKLTPEVLLAAPRRSPGVPNATGELVLYTVSTYSFDSHSKTAQIRVLNLKEGTSHLVSEDSAASEPIWIAEQEIAYVKSLDHGASALVAQHVFNPNESNTIQRFGGSINSLKAKPLSTDKVAFCCAALTTPDGRMYSPAAEPKSYTSAKIYTSLFVRHWDSWNTENKNSLWYGQLNKVDGKWTLGNSELTNLLAGTRLHSPVPPFGGTGDFDISTTGIVFVAKDPDLNHARTTKTDLYFVPLNSYLDQPTFPQIVKTGALRGYSLSPVFSNDGKQVAFLRMKSQQYEADKTRLLLIPDVTDLSNVQEFYATEDGKGGWDYKPDWLIWSHDDKELYVAAEKHARVVLWKLPSSPLEAKSLPTPIHEDGSVAEARVLGKGSSLLITTRSRVESSNYSILDPASKSTTIISSSSRQGKTFALSKSQCQEIWFNGSKGYPIHALVTLPSTFDSSKKYPLAFFIHGGPQGAWGDDWSTRWNPAVFAEQGYVVVSPNPTGSTGYGQDHTDAIQNNWGGDPYIDLVKCFEFLEEEVNYIDTTRAVALGASYGGYMINWIQGHDLGRKFKALVCHDGVFSTLNQWSTEELFFPEHDFGGALWENREGYEKWDPAKHVGNWATPQLVIHNELDYRLPISEGLAMFNVLQARGVPSKFVMFPDEHHWVLKPENSLVWHREVLNWINKYSGISEKN

SEQ ID NO: 120 - DNA, 2073 bp, Trichoderma reesei
atgaccatcacggcccagaaactcaccccagaggttctcctcgcggcgccgcggcgctccccgggggtgcccaatgccacgggcgagctggttctgtatacggtctcgacatactccttcgactcccactccaagacggcgcagatccgcgtcctcaacctcaaagaaggcacgtcgcacctcgtctccgaagactccgccgccagcgaaccgatctggattgccgagcaggagattgcctatgtcaagagcctcgatcacggtgcttcggccctggtggcgcagcacgtcttcaacccgaatgagtcaaacacgatccagcgcttcggcggcagcattaacagcctcaaggccaagccgctgtccacagacaaggtggctttctgctgtgctgccctgacgacccccgatggccgcatgtacagcccggctgcggagccaaagtcttacacgtcggccaagatctacacatccctctttgtgcggcactgggactcctggaacaccgagaacaagaactcgctctggtacggccagcttaacaaggtcgacggcaagtggacgcttggaaactcggagctcaccaacctcctggccggcacgcggctccattctcccgtgcccccctttggaggtaccggtgactttgacatatccacgaccggcattgtgtttgtcgcaaaggatccggatctgaaccatgcgagaacaaccaagacggacctgtactttgttccactaaattcatacttggaccagccaacatttccccagattgtcaagacgggagcgctgcgaggctattcgctctctcccgtgttttcgaatgatgggaaacaggtagctttcctgcgcatgaagtcccagcagtacgaggccgacaaaacgaggctgttgctaattccggacgttaccgacttgagcaacgttcaggagttttatgccacggaagatggcaagggtggttgggactacaagcccgattggctcatctggagccatgacgataaggaactgtacgttgcggccgagaagcacgctcgagtcgtcctgtggaagttgccgtcatcgccattggaggccaagtctctgcccactcctattcacgaggatggatctgtggccgaagctagagtcctcgggaaaggctcgtctcttttgatcacgacgagatctcgcgtcgaaagctccaactactcgatattagaccccgcctccaaatcgaccaccatcatctcatccagttcaaggcaaggtaagacctttgctctaagcaagtcgcagtgccaggagatttggttcaatgggtccaagggctaccccatccacgccctagtgaccctgccctcaacattcgactcatccaagaagtatcccttggcctttttcattcatggcgggccccagggagcatggggagacgattggagcactcgatggaacccggccgtctttgctgagcaaggctacgttgtggtgagccccaatccaaccgggagcacaggatatggccaagaccataccgatgccatccagaacaactggggaggcgacccctatatcgacctggtcaagtgctttgagtttctggaggaggaagtgaactacattgatacaaccagagcggtggctctcggggcgtcctatggcggctacatgattaactggatccaaggccatgaccttgggcggaaattcaaggcattggtgtgccacgacggcgtcttttcgaccctgaaccagtggtccacagaggagctcttcttcccggagcacgactttggcggcgccctctgggagaatagagaaggttacgagaagtgggatcccgcaaagcacgttggaaactgggctacgccgcaactggtcattcacaatgagcttgattaccgcctgcccatctccgagggtctggccatgttcaacgtcctacaggctcgtggcgtgccgagcaagtttgtcatgttcccggacgagcatcactgggtgctcaagcctgagaactctctcgtctggcacagggaagtgttgaattggatcaacaagtacagtggaatatctgaaaaaaactag

SEQ ID NO: 121 - protein, 310 aa, Trichoderma reesei
MKSSTLLSGALVAAAQVYTALGATAVRAHEVSHVIRANIQLPSQPPVPNAYRSQGCWSSKGNMTHATAVKSTTVSSGSCNDYCKSKEMPVSGLQGDECFCGMVYPPQGDQVEDSKCSFPCPAYPKEACGQIGQPGYFSVFNTGVNINPDYYEPPKSTTTSPSSTSTSTDAEKSSAAAGSSGIASASAEPTSADGGSKKKTNVAGIAAGTVVGVVVLGGLLGAAFFTLRRRRNAEIEEEHRRNAAVNAFINGSKPPSTSGSISMTDSRLDPIMAHRRLSDGSIADNEDYSRRILRVCRCLPSASFVSICPD

SEQ ID NO: 122 - DNA, 933 bp, Trichoderma reesei
atgaagtcgtcaacacttctttctggcgccttggtggccgccgcccaagtctacacggcccttggcgcaactgccgtcagagctcacgaagtgagccacgttatccgagccaacatccagctgccatcacaaccgccagtgccgaacgcctaccgatcgcagggctgttggagctccaagggaaacatgacgcatgccaccgcagtcaagagcacgaccgtttcgtctggttcgtgtaacgattactgcaagtccaaggaaatgcctgtctcgggactgcagggcgatgaatgcttttgcggaatggtctacccccctcagggcgaccaggtcgaggactccaaatgctcctttccttgccctgcgtatcccaaggaggcctgtggtcagatcggtcagccgggctacttttctgtcttcaacactggcgtcaacatcaaccctgactactacgagccccccaagtcgacaaccacatcgccctcgtcgacctcgacgtctacagacgctgaaaagtcatcagccgctgctggctcttcgggcattgccagtgcgtctgcggagccaacctctgcagacggaggatccaagaagaagacaaatgttgccggcatcgccgcgggaaccgtcgtgggcgtcgtcgtcctcggtggtcttctcggagctgccttcttcaccctgagacggagacgaaacgccgaaatcgaggaagagcatcgccggaatgctgccgtcaatgccttcatcaacggctccaagccgccttctactagcggtagcatttcgatgaccgactctcgcctcgaccccatcatggcccaccgcaggctcagtgatggcagcattgcggacaatgaagattactctcgccgcatcctgagggtatgtcgttgcttgcctagcgcctcgtttgtaagcatttgcccggactaa

SEQ ID NO: 123 - protein, 538 aa, Trichoderma reesei
MHAVNLHARHDPEQRVSVRQYEDRYPNIKAYNFSVPIDHFHNESRYEPHSGDSFPLRYWLDISNYKPGGPVIVLHSGEFDSTERLPYLQHGIVPILTKATGGVGLIMEHRYYGTSFPVPDLTTESLRFLTTEQALADTAYFAKHVRFPGLEHLDLTASKTPWVIYGGSYAGAFAAFARKLYSEVFWGAISSSGVTAAVEDLWQYFEAARRYAPGDCGPTTQKLTHVVDTVLFGDDRAKVLGFKQLFGLGDLDDDDFATTITRGLYGLQSTNWDPEEDVSSLGIYCAVVTSNFQLFASTTHLIPTVQDLVAKAGFAAEAEVLSVRMLNYIGYVRDYVKTDLAKGCKGKSVSECFSPRYSTPNDTSLNAGWLRSWSWQVCTQWGYFVTGSGTPRDQLPMISRAITLESASSHCKRLFNITTSPDVESINKLGGFNFSYPRLAILDGLQDPWRSATPHASGLPDRESTTSEPFMLIDWGVHHWDEFGLPEDVHVEGLPPPQVAEAHMAEIEFVKAWLADWKEENGISMLQSMDEEETMGEL

SEQ ID NO: 124 - DNA, 1617 bp, Trichoderma reesei
atgcacgccgtcaatctccacgcgagacacgatccagagcagcgcgtgtcggtgcggcaatatgaggacaggtaccccaatatcaaggcgtacaacttctcggtcccgattgaccattttcacaacgaatcgaggtacgagccgcactcgggcgattcgtttcccctgcgatattggctcgacatctccaactacaagcctgggggccccgtcattgtcctgcactctggcgaatttgacagcactgagcgactgccttatcttcagcatggaatcgtgccaatcctgacaaaggcgacgggaggagtcggtctcatcatggagcatcgatactacggcaccagcttccctgtccctgaccttacaacggaaagtctgcgcttcctcacgacggaacaagctctcgcagatactgcctactttgcaaagcacgttcggttccccggtctggagcatcttgatcttacggcttccaaaacgccttgggtcatatacgggggtagttatgctggcgcctttgcagcattcgctcgcaagctatacagcgaggtcttctggggcgctatttcatcttcaggcgtcacggctgccgtcgaagacctgtggcaatactttgaggccgcgagacgatacgctccaggggactgcggccctaccacgcagaagcttactcatgttgttgataccgtcctctttggcgacgacagggccaaggtactcggcttcaagcaactatttggcctgggggatctcgacgatgacgactttgccaccaccatcacccgcggcctctatggactgcagtccaccaattgggaccccgaagaggacgtctcctcccttgggatttactgtgcagtcgtcacttcgaactttcagctgtttgcaagcacgactcacctcattccgaccgtgcaggatctcgttgccaaagccggctttgcagcggaggccgaggttctctctgttcgcatgctcaactacatcggctatgtcagggattacgtcaaaactgatctggcgaaaggctgcaaggggaaatcagtgtcggaatgcttctctcctcgctattcgacccccaatgatacgagtctcaacgccggatggctccgtagctggagttggcaggtctgcacacaatggggatattttgtcactggctcaggtacgcccagggaccagcttccaatgatctctcgagccatcaccctcgaatccgcatcatcgcactgcaaaagacttttcaacatcaccacctccccggacgttgagtctatcaataagctagggggcttcaactttagctaccctcgcttggcgattttggacggcctacaggatccatggcgctcggccacgccccacgccagtggccttcccgaccgagagtcaaccaccagcgagccgtttatgctcattgactggggggtgcaccactgggacgagtttggcttgcccgaggacgtgcacgtcgagggtctgccgccgcctcaagttgctgaagcccacatggcagagattgagttcgttaaggcatggttggcggactggaaagaagaaaatggaatatcaatgttgcaatcgatggacgaggaagaaacgatgggtgaattgtaa

SEQ ID NO: 125 - protein, 795 aa, Trichoderma reesei
MANESTPLIQTVRVGPPRRRYRHHTLRRFCNIACVSLLLCGFASFALHSLYIWPSGQEHRHRHPHHPHHGHPDHGHKHLSHEDLQAILLDTPSSEKAEEWSRYYTSGAHLAGKNYSQAEWTKDRWEEWGVKSSIVAYDVYINYPIDHSVSLLEKSSDAKSWNVAFKASLTEDVLEEDPTTAAKDKIPTFHGYSASGNVTGSFVYVNYGTYRDFADLVEAGIDLEGKIAIARYGGIFRGLKVKRAQELGMIGVLIYSDPGDDGEITEENGYAAYPEGPARNPSSVQRGSVQFLSSRPGDPTTPGYPSKPGVPRAPADETTPSIPSIPISYADALPLLKALNGHGPRASDLNKWWNRKLGLGYKGVDYNIGPSPEDVVINLYNEQDYVIAPQWDVIGIINGTIPNEVIIVGNHRDAWIVGGASDPNSGSSVLNEAVRSIGKALEAGWKPLRTIVFASWDGEEYGLIGSTEWVEEYLPWITDANVAYVNVDGGASGPQFSAAAAPLLNQVLRDATHLVPSPNQTVAGQTVGDVWDGKISTMGSGSDFTAFQDYAGIPSLDMGFGGNGSGPVYHYHSNYDSFHWMSEYADPGFVYHRTMAQVLAVLVGELADRVVIPFGATEYADALDSYLDKVEAKLQPADADLATDDEIFAVRGSVSSHEVIGSQDAFEESLKKIRHSISEFRDKAVKLDERAAWAKKKLEEGLPWWNIIGKARLGLTIIRVNHQYKYIERQFVFEGGLDNRSWFKHVVFAPGLWTGYAGAVYPGLVESIDAKNYSNGLKWAGIIKHAVDKATKSIQ

SEQ ID NO: 126 - DNA, 2388 bp, Trichoderma reesei
atggccaacgagtcgaccccgttgatccagacagtgcgagtagggccgccgcgcaggaggtatcgtcaccacacgcttcgtcgcttctgcaacattgcctgcgtcagcctgctgctctgtggctttgcctcctttgcgctgcactccctctacatctggccctctggacaggagcaccgccaccgtcatcctcaccatcctcaccacggccaccccgaccacgggcataagcaccttagccacgaggatctgcaggccatcctgctcgacacgccttcttcggaaaaggctgaggaatggagccgctattacacgtcgggagctcaccttgccgggaagaactattcacaggccgaatggaccaaggacaggtgggaggaatggggcgtcaagtccagcatcgtcgcctatgatgtctacatcaactaccccatcgatcatagcgtatctctgctggaaaagtcgagcgacgccaagtcctggaacgttgcgttcaaggcctctctgaccgaagacgttctggaggaggatcctaccaccgctgccaaagacaagatcccaacgttccacggctactccgccagcggcaacgtcaccggctcctttgtctacgtcaactatggaacgtaccgagactttgcagatctagtcgaggctggcattgacctcgagggaaagattgccattgccaggtatggaggcatcttccgaggcctcaaggtcaagcgcgcccaggaactcggcatgattggtgtcctcatctacagcgaccccggcgatgatggcgaaatcaccgaggaaaacggttacgctgcctatccggagggccctgctcgtaaccccagcagcgtacagcgcggaagcgtccagttcctaagctcgcgccctggcgacccaacaacccctggctacccttcgaagcccggtgtccctcgtgcaccggctgatgaaaccaccccgtcaatcccctccatccccatctcctatgccgatgccctgccgctgctcaaggcgctcaacggccacggccctcgggctagcgacctcaacaagtggtggaacaggaagctcggcttgggttacaagggcgttgactacaacattggaccctcgcccgaggatgttgtcatcaacctctacaacgagcaggactatgtcattgctcctcaatgggacgtaattggcatcattaacggcacgatccccaacgaggtcatcattgtgggcaaccaccgagatgcctggatcgtcggcggcgcgtctgatcccaacagcggctcgtccgtcttgaatgaagccgttcgaagcattggcaaggccctggaagcgggctggaagcctctccgaaccattgtctttgccagctgggacggagaggagtatggcctgattggaagcacagagtgggttgaagaatacctgccctggatcactgatgccaacgtggcatatgtcaatgtcgatggcggtgcttctgggccgcaattctctgccgcagcagcgcctctattgaaccaggttcttcgagacgccacccatctcgtgccatcgcccaaccagactgttgctggccagactgtgggagatgtgtgggacggtaaaatcagcacaatgggctctggcagcgacttcactgccttccaggattacgccggcattcccagtcttgacatgggattcggcggcaatggcagtggtcctgtttatcattaccacagcaactatgacagcttccattggatgagcgaatatgctgaccccggcttcgtctaccatcgaacaatggcccaggttctcgcagtcctcgtcggggagcttgccgaccgagtggtgattccgtttggagcaaccgagtatgcagacgctctggacagctatctcgacaaggttgaggccaagctgcagcctgctgatgccgacctggctactgacgatgaaatctttgccgttcgaggcagtgtctcttcccatgaggtaattgggagccaggatgcctttgaggaaagcctcaagaaaatccgacactcaatctccgaattcagggacaaggcagtcaagctggatgagcgcgcggcctgggcgaagaagaaacttgaagaaggccttccatggtggaacatcatcggcaaggccagactcgggctcacgatcatcagggtgaaccaccaatacaagtatatcgagcgacagtttgtgtttgagggtggcttggacaaccgcagctggttcaagcacgttgtctttgctcctggcttgtggacgggctatgctggtgctgtctatcccggactcgtcgaaagcatcgatgcaaagaattacagcaatggtctgaagtgggctgggatcatcaagcacgctgtcgacaaggctacaaagagcatccagtag

SEQ ID NO: 127 - protein, 571 aa, Trichoderma reesei
MAVSKLSLLLAGVAGASAYIAAPARGYGQELLSSLTHSIAHPVTHPELQCELPPVLDPSGDGLPSADELFSSKSVRELQVQRLQAIVQVPSVSYDDLGPVGQDERWAPFFDLHDVIKETFPNLHKKAKLEKVNTLGLLYTIQGSDESLKPVLLMAHQDVVPVADESTWTYPPFDAVYDGKLIWGRGTSDDKNSLTAVLSAFEALLSNDDWAPKRTFVLAFGFDEECSGYRGAGKISEVLKKRYGKDSFAAILDEGGLGLLEVGNALYVLPAVTEKGHIDIFFELDVVGGHSSIPFPHTGIGIIAEIITELESHPFKAQLVEDGPVHNHLQCQARYSPDARPELTELVRQGDLDGLTQWLVRDGRSTQYVVQTSQAVDVVNGGQKMNAMPEKTILGVNYRVAHHNSLAEVQHNAVRRVANIVKKYGLTLKPFEGDDDYEKYVADLKTEEEEDVELKEVIDYKGTLILSTNGKSHPSPISPTRGAAWDVFAGTVRHTFRFDNGTVVPTGEIMTGNTDTRHYIGLSENIWRFTPDRFHAENNIHTIDEHSRVDGHIEMLKFYYDFVRNFDAAKF

SEQ ID NO: 128 - DNA, 1716 bp, Trichoderma reesei
atggcagtctccaagttgtctctgctgctggccggcgtcgctggagcttccgcctatatcgccgctcccgcacgaggctatggtcaagagctgctgagctccctcacgcactccatcgcacaccccgttacacatcccgagctccagtgcgagttgccacccgttctcgatccgagcggcgatggtctcccctctgctgacgagctcttctcgtccaagtcggtgcgagagctgcaggtccagcgccttcaagccattgtgcaggtcccctccgtctcgtacgacgacctgggccccgtcggccaagatgagcgctgggcgccctttttcgacctccacgatgtcatcaaggagactttccccaacttacacaagaaggccaagcttgaaaaggtcaacactctcggcctcctctacaccatccagggctccgacgagtcgctcaagccggtgctgctgatggctcaccaggatgtcgtcccggttgctgacgagtcgacatggacatacccgccattcgacgccgtatacgacggcaagctgatctggggccgcggaacatcagacgacaagaacagtctcaccgccgttctatcggcattcgaggcgctgctgtccaacgacgactgggcgccgaagcgcacctttgtgctggcctttggattcgacgaggagtgctcgggctaccgtggcgccggcaagatctccgaggtcctcaagaagcggtacggcaaggacagctttgccgccatcctggatgaaggcggcctcggcctgctggaagtcggcaacgccctctatgtgctcccagctgtgacggaaaagggccacattgacatcttctttgagctggacgttgtcggcggccacagctcgattcccttccctcacacgggcatcggcatcattgccgagatcatcaccgagcttgagtcccaccccttcaaggcccagctggtggaggatggcccggtgcacaaccacctgcagtgccaggcgcgctactcgcctgacgcgcgtccggagcttaccgagctggttcgccagggtgacctggatggtctcacgcagtggctggtcagagacggccggtccacgcagtacgttgtccagacgtcgcaggccgtcgacgtggtcaacggaggccagaagatgaacgccatgccggagaagaccatcctgggcgtcaactaccgagttgcccaccacaacagccttgccgaggtgcagcacaacgccgtccgaagagtcgccaacattgtcaagaagtacggcctgacgctcaagccattcgagggcgacgatgactacgagaaatacgtcgccgacctgaaaaccgaggaggaggaggacgtcgagctgaaagaggtcattgactacaagggcacgctgattctatcgaccaacggcaaatcccaccccagtcccatttctcccacgcgcggtgccgcttgggacgtctttgccggcactgttcgacacaccttccggtttgacaatggaactgttgttccaacgggagagattatgacgggcaacacggatacccgccactacattggcctttcggaaaacatttggcgcttcacccccgaccgattccatgccgagaacaacatccacacgatcgatgagcactcgcgggtggatggccacattgagatgctcaagttttactacgactttgttcgcaactttgacgccgccaagttttag

SEQ ID NO: 129 - protein, 421 aa, Trichoderma reesei
QWTGTVDVTPSHRLFFWFFNSRNDPVRDPVIVWMNGGPGGSSMMGLFNELGACWLDPGANATVPNPFAWNNNASVLFLDQPAGVGLSSRSPGSPLQAHDVDGAADFQAFLNIFFGKIFPDRAHLPIHIAAESYGGHYGPVYLKHILDSRRFDSPDAFRGNISSLILVDAVIDFAAPAVGTYEFLCRGYGHHGKIMNDSTCDALRRSVPKVFELDRNCDAGNDGYECWGMTTFLEEVVHPYYYAEVEAGKRNPFNVHIPCPNWPWCADIRKGNITAYLNQPAVKAALGFPPSFTFEDVDIPLNAAYTLSKDPFRPTARQVAAVLDAGIRVLVLQGNEDYIVNTPGNMWAYDNLRWSGLADYRLAHWRPLPEGVAATGTWKAGGEGGRLAFVAVDGAGHTVPGDVREGSWRIVKEWLEGGWRG

SEQ ID NO: 130 - DNA, 1266 bp, Trichoderma reesei
caatggaccggcaccgtcgacgtgacgccctcccaccgcctcttcttctggttcttcaacagccgcaacgaccccgtgcgcgaccccgtcatcgtctggatgaacggcggccccggcggcagctccatgatgggcctcttcaacgagctcggcgcctgctggctcgacccgggcgcaaacgccaccgtcccgaacccctttgcctggaacaacaacgcctccgtcctgttcctcgaccagcccgccggcgtcggcctctcgtcccgcagcccgggctctcccctgcaagcccacgacgtcgacggcgcggccgacttccaggcctttctcaacatcttctttggcaaaatctttcccgatcgcgcccatctcccgatccacatcgctgccgagtcgtacggcggacactacggacccgtctatctgaagcacatcctcgattcccggcggttcgactccccggacgccttcaggggcaacatctcctcgctgattcttgttgatgccgtcattgactttgcggcgcccgcggtgggcacgtacgagttcctctgcagggggtacggccaccacggcaagatcatgaacgactcgacgtgcgatgccctgcggcggagcgtccccaaggtgtttgagctggacaggaactgcgatgcgggcaacgacgggtacgagtgctggggcatgacgacctttctcgaggaggtcgttcacccgtattactacgccgaggtcgaggcaggcaagaggaacccctttaacgtccacatcccctgccccaactggccctggtgcgccgacatccgcaagggcaacatcaccgcctacctcaaccagcccgccgtcaaggccgccctcggcttcccgccctccttcacctttgaagacgtcgacatccccctcaacgccgcctacacgctgtccaaggaccccttccgccccacggcccgccaggtcgccgccgtcctcgacgccggcatccgcgtcctcgtcctccagggcaacgaggactacatcgtcaacacccccggcaacatgtgggcgtacgacaacctgcgctggagcgggctggccgactaccggctggcgcactggcggccgctgcccgagggcgtggcggccacggggacgtggaaggccggcggcgagggggggaggctggcgtttgtggcggtggacggggcgggacatacggtgccgggggatgtgcgcgagggcagctggcggattgtcaaggagtggcttgaggggggctggagagggtga

SEQ ID NO: 131 - DNA, 2003 bp, Artificial Sequence
  siRNA
ctaccccgcttgagcagttaattaatttgaatggccggccggtgacctgtttactcaatcgcacgctattagtctttgtatgctcatgacgagcgcgcagacggagggcgcgatgtgcgatctcgaactcgtttgcgatggccagacaatcagggtccataagctcgtcgtctgtttgcaatctctagttactgctccgttagcacaacccactgtggccgtggctgccaaggacacggcggctaccatccgcaagcgcagaagacgcgcccctgctggtggtgccacggacgactgcttcacatgctctaagcgcaatgtcaaatgcgatcgacgccggaggcgacaaaatcacagctgtgaccagtgccgaaggtcgaaaagaggatgtgatgctccctccttggaagcaggacaacgcagctcgaatctgtggcaactgaataacggtaatagctctttcaagtgctcttactgcaacaagaccaacatcaaattcacgccaagaaacaactcccagcttttagccttgctgccaggcgatgcagataccttcagcgacatcgtctacctcattagtgaatatgaaggcgtcatggaccgcagcgaaagccttgcggccaatcttggggccaagctggacggcatgatgtctcaacccatgggacagcaggcgttctacttctacaaccacgagcacaagatgtcccctcgacaagtcatcttcgcacaacagatggccgcctaccagatgatgccctcgctgccgcccacgcccatgtactcgcgagagcgacaaacggatcttagggtccagctaaatgccgaggaagaggagcggccagtcattattcgtgcttgcgacatgtgccgcaagaagaagatacgctgcgagcccacttcgcaaggatgcggtccatgcaccaaatatggcacaagggccctcgcagctcaacagcatactcaggccgattggggccgctggtctcaccagattccacagagttttcccatgatgggctctccaggattcatgtcatacgatcccagagctcaggacggcagtcagatgcagcgtcaggtgtctgctctcgacgagccagaaggagagactgcccccaaagatggccctcgcgacctgctcgaagagtttgccatcgagtctcactgcctggacgcgcccatgtcgatggaagacctggagcttctacgagcagacattgagtccgacaagtcgcctgaattgcctgtcccggctactaggcgacgcgagacagtcgactgtttcaattgcgcagcatcacggcgatcctgtgatcgaacaaaacaccggtgcgatacctgcgcgaagtcgtccgagcactgtgagggatatccaagggcactccagtcgtcgaatgatccttccgtccgtcgcattctgcctcaggacgcaccaaacgcacagaatgcaggattgaacagctacacctttgcgcctcagcaatttcctcagagggagactcagaagaactatgtgttcgttgacgagcacaatcgcaacatgacgacaacgctgccattggtgggtggacgtgaggagaagccgcagcagacgcagacgcaagcccagcaaccacgcaagaagcacgcgaagctattccacaagaagagtcggactggctgccaacgatgtcgaatccgtcgtgtctcaacagcgactttcaggagggccgcaccggcgtgataaaaatagaccagttcgatcccgagactgtgagacgcctggtcgagtttctctacacgggagactatggccgccagcctcaggagcctcagcccgtgcaggagcagactcaaggttcgtcgctgccaagtggtgcgaagtcccgtcaggccgacccaatccactgaccgaatgagccttaggagtagtcaacactgatgatcaagacactccagggcgcgccaatatagcgatcgcggatccacttaacgttactgaaatcatcaaacagcttgac

SEQ ID NO: 132 - DNA, 2931 bp, Artificial Sequence
  siRNA
ctaccccgcttgagcagttaattaatttgaatggccggccccgttaccttggccgcgaagaagccaaagctctgctccgccctcgacgagaggccacggccgccgtcaagagatggctggccagggctggtgttcctgctcatgatgttttgactgatgggcagttcatccacgtgcggacgcttgcggagaaggctcaggctctgcttggattcgagtacaactcgacgctgggttcgcagacaatcgcaatctctacccttccaggaaagatacggaagcatgtcatgacttcattggctctgacgtgcgtgtccgcgacgacaccatgcccactgccaacgtcgccattgctgttgagggtgtcagctggaactctgatgactactacactgctctcgtcgctcaggccattgttggcaactacgacaaggccatgggcaacgcccctcaccagggcggcaagctcagcggctacgttcacaagcacgacctggccaacagcttcatgagcttctccaccagctacagcgacactggaatggcaagcggaggatctttgcagatggcagcgcgtctgcctgcagcgaggcgggctgctacggcatcaccaagaggccgcggctggacgactgggggcgcgtcattggcttccacggcaagggccatcatgcggccggctgcgagcacgagcgttccggccttgtgagccctgctgccgccgctgccgaggccgaggccgcctcgatccacgtcaagaacctcgcctttctcgtcatccgcgagcgggagttcacgcacggcgccatggagaactggggcctcgtcacctaccgcaccacccaggtgctctttgacgagaagacgtcggatgcccggttcaagaacgccgtcgcctacgtcgttgcccacgagctcgctcaccagtggttcggcaacctcgtgaccatggactggtgggatgagctgtggcttaacgagggcttcgctacctgggttggatggcacgccgtcgaccacctgcaccctgactggcaggtgtgcatctcggactcgttaaccttcaacaaccaattcgatctggagctcaagcgatcaactgggctccgagggattgaccccaggagtctctttggtcgccagtccatcgacggaggctccaacggtgggggtagtggccaggaccttatttccagcattggacaaacggctggatgccctacgacgaaaaaggtggccttggtcggcattgcgaccgactgtacctactggaacggcttcaactcatcccagccaatggccaaaatccgtcagatgccaacccctcgcctctgcgcggggccctcgaccgctttgcgcagttcttcattgagccgctcttcttgtccagcactttggacagggagctccaggccgtcgactcggagaacaagaagaacctgcagaatgacacctggcgcatccaccagctcgccaagtctctgtcgaacccgaagcaccctttctgccacttctctaccggcaacctggaggtgctcaatcatgggcaccgactgcgtgtccgaggcgtgctccctgcacgactccttcgggcccgaggactcggacactctgaagactagcacaaaagacttctccattgcgtatggatctggggccgtcagcggctctctggtcaacgataccatcgaggtggcgggcatgagcctgacatatcagtttgggctggctcacaacacctcttcggactttgtgcactttgcctttgacggcatcctcggcatgtcgatcgagaaggcttttggcatcgacttccccctgcccaagatggaccaagttgccatccccgactttgcccagggagccatggagaactggggtctggtcacgtacagagttgtggacctgatgctggatgaaaaggcaagcggtgccgctaccaagcagcgcgtggccgaggttgtccagcacgagctggcccaccagtggttcggaaacctggtaacgatggactggtgggagggtctctggctcaacgagacgccaaggcatccgatgagacagagtcctctgaggaaatgttgatccacgtcgccatgttcacgctggcggacaagtatataatcgatgggctgcgcactctctcacagatcaagttcaaggcggtcgtcacgaagcaggagaagcccagcgtgatgccacagtacgtcaagctcgtgtacgacctcgagtgtgagagcagcaagaggctccgcgacgtcgtgattgaggctgtccggctgagggtcgcagagcagctggggaagcgtcggctatgctcccagccttgtgcactcgccagacggaacaccaagatataccagatatcctctccatctcagcaccgatgcgctctcctcgtcgtgcgagtcggtcggcagcgaggtggactacctttctcctctgagccaatcttatgctcgcgaagagattcctttcaaccacagcccgactgtcctgtacgagggatatcctgcacagcatagctcccctattgcgcacctggtgctggccgcccccgccatcgagaagcgagcagagcctgctcctctccttgttcccactaccaagcacggcctcgtcgccgacaagtacattgtcaagttcaaggacggcagctccctccaggcggtcgacgaggccattagcggcctcgtctccaacgccgaccacgtctaccagcatgtcttccgtgggtttgctgccactctggacaaggagactctcgaggctcttcgcaaccaccctgaagtgagttaatgatgcccgtcttgacaaggaagagacgaagagagaagggcacgtacttacaaacacatctcttgcatagggcgcgccaatatagcgatcgcggatccacttaacgttactgaaatcatcaaacagcttgac

SEQ ID NO: 133 - DNA, 3330 bp, Artificial Sequence
  siRNA
ctaccccgcttgagcagttaattaatttgaatggccggccccgttaccttggccgcgaagaagccaaagctctgctccgccctcgacgagaggccacggccgccgtcaagagatggctggccagggctggtgttcctgctcatgatgttttgactgatgggcagttcatccacgtgcggacgcttgcggacgggaacacccaacgagaacgagccttatttacagtattacgaatttctgttgtccaagtccaacgctgaaattccgcaagtcattaccaactcctacggcgacgaggagcaaactgtgccgcggtcatatgccgttcgagtttgcaatcacttcattggctctgacgtgcgtgtccgcgacgacaccatgcccactgccaacgtcgccattgctgttgagggtgtcagctggaactctgatgactactacactgctctcgtcgctcaggccattgttggcaactacgacaaggccatggaatggcaagcggaggatctttgcagatggcagcgcgtctgcctgcagcgaggcgggctgctacggcatcaccaagaggccgcggctggacgactgggggcgcgtcattggcttccacggcaagggccatcatgcggccggctgcgagcacagttcacgcacggcgccatggagaactggggcctcgtcacctaccgcaccacccaggtgctctttgacgagaagacgtcggatgcccggttcaagaacgccgtcgcctacgtcgttgcccacgagctcgctcaccagtggttcggcaaccgtgcatctcggactcgttaaccttcaacaaccaattcgatctggagctcaagcgatcaactgggctccgagggattgaccccaggagtctctttggtcgccagtccatcgacggaggctccaacggtgggggtagtggccaggaccttatcagccaatggccaaaatccgtcagatgccaacccctcgcctctgcgcggggccctcgaccgctttgcgcagttcttcattgagccgctcttcttgtccagcactttggacagggagctccaggccgtcgactcggagaacaagaagaacctgatgactccgatacctttgacgaggtcggccaaggcctgttcgacatcacctacgtcgacgggtcctcgtccaaaggcgattacttccaggacaacttccagatcaacggcgtgaccgtcaagaatctcaccatgggtctcggcctgagtcatgggcaccgactgcgtgtccgaggcgtgctccctgcacgactccttcgggcccgaggactcggacactctgaagactagcacaaaagacttctccattgcgtatggatctggggccgtcagcggctctctggtcaacgataccatcgcgagaaggcttttggcatcgacttccccctgcccaagatggaccaagttgccatccccgactttgcccagggagccatggagaactggggtctggtcacgtacagagttgtggacctgatgctggatgaaaaggcaagcggtgccgctacgggagctcgagctgttcgactcacagcctgccaccgtctttggcctggacaaggagttcatcaccgccggcagaatcgacgacaagctgtgctcgtggtccgccctcctgggccttctccactccacagagcgggactcggacagctacagtataggcgccgtcatctttgctgcggcctggctcgcgtctctcgccgtcttcgtctctaccggatcgtacaagcacgcgagcgatgtggagcatgatccagacgccgactttcgaggctcaggcaaaccggtcaccttggagcagctcttacgacgtcgacgaggtcaagctgacgaccgaggtcaacgcgacgctcgcccacctggccaatgccacctccagctcgaccatctacgccatcaacggccaggtgtcggaccacatcaccttcatcggcttcgagaacaaggactttgccctgcaggagattgacatcatgaagaggttattcgccgcatacccggatgactttgctcacgacattgacagctccgatgccattgacgccttccgagccgggaagctcatctcccccttgggcatcgaaggccttcatcagattgccaaccgctggccaagaaggcgggcgttgacgaggccgagctgaaccttttcctcgagtatgttgccatgttcctcggcaacatgggcaactacaagagctttggcactccaagttcatccccaggtgcagcgagacgactgtcgctgctctggggtggctttctgctgtgctgccctgacgacccccgatggccgcatgtacagcccggctgcggagccaaagtcttacacgtcggccaagatctacacatccctctttgtgcggcactgggactcctggaacaccgagaacaagaactcgctagtctacacggcccttggcgcaactgccgtcagagctcacgaagtgagccacgttatccgagccaacatccagctgccatcacaaccgccagtgccgaacgcctaccgatcgcagggctgttggagctccaagggaaacatgacgcatgcatggcctgcgtgagcatgctccagctcttgagctacttcaccaccgagggacagcagccgaaacacggcatcgtgctgctctttaacaatgccgaggaagacggcctgctgggcgcccgcgcgttcggttacagcccgctgctcaagttcacgccaaggcatccgatgagacagagtcctctgaggaaatgttgatccacgtcgccatgttcacgctggcggacaagtatataatcgatgggctgcgcactctctcacagatcaagttcaaggcggtcgtcacgaagcaggagaagcccaagagcagctggggaagcgtcggctatgctcccagccttgtgcactcgccagacggaacaccaagatataccagatatcctctccatctcagcaccgatgcgctctcctcgtcgtgcgagtcggtcggcagcgaggtggactacctttctcaagttcaaggacggcagctccctccaggcggtcgacgaggccattagcggcctcgtctccaacgccgaccacgtctaccagcatgtcttccgtgggtttgctgccactctggacaaggagactctcgaggctcttcgcaaccaccctgaagtgagttaatgatgcccgtcttgacaaggaagagacgaagagagaagggcacgtacttacaaacacatctcttgcatagggcgcgccaatatagcgatcgcggatccacttaacgttactgaaatcatcaaacagcttgac

SEQ ID NO: 134 - DNA, 1914 bp, Artificial Sequence
  siRNA
ctaccccgcttgagcagttaattaatttgaatggccggcctttagcggtggctcaactgcgcctcgaggactgggaactcagtcctcatccacctccttcagcacaattctcaacgtcaaggaggtcaccagcggtctgcagggcctggccaacacgtacggagttcaaactttcaacactccttacaagacggcccagggcgcaaccgtcgtcggagccaaggtcggcggtaccggaggtaactgtaccgatgcctaccgcgtcttcttcaacggcaacatccacgccctgcactctggcgaatttgacagcactgagcgactgccttatcttcagcatggaatcgtgccaatcctgacaaaggcgacgggaggagtcggtctcatcatggagcatcgatactacggcaccagcttccctgtccctgaccttacaacggaaagtctgcgcttcctcacgacggaacaagctctcgcagatactgcctactttgcaaagcacgttcggttccccggtctggagcatcttgatcttacggcgaaaagtcgagcgacgccaagtcctggaacgttgcgttcaaggcctctctgaccgaagacgttctggaggaggatcctaccaccgctgccaaagacaagatcccaacgttccacggctactccgccagcggcaacgtcaccggctcctttgtctacgtcaactatggaacgtaccgagactttgcagatctagtcgaggctggcattgacctcgagggaaagattgccattgccaggtatggaggcatctgcctcgtccctcaaggagtcgtttggcgagctgacggccgacgcaaaggccgtctgggacgaggtcgccatgctggcccccgacgccatggcggccttcaaggagcaggtcaagggcatcaagcccaagaagcacgaccgcaagcccgacggcgactgggaccacgtcgtcaagggcgccgacgtccagaagctgtgggtggaggacgagtcgggcgagccgcgccggctggtcggcggcaagctgtccatacccgccattcgacgccgtatacgacggcaagctgatctggggccgcggaacatcagacgacaagaacagtctcaccgccgttctatcggcattcgaggcgctgctgtccaacgacgactgggcgccgaagcgcacctttgtgctggcctttggattcgacgaggagtgctcgggctaccgtggcgccggcaagatctccgaggtcctcaagaagcggtacggcaaggacagctttgccgccatcctggcgaccccgtcatcgtctggatgaacggcggccccggcggcagctccatgatgggcctcttcaacgagctcggcgcctgctggctcgacccgggcgcaaacgccaccgtcccgaacccctttgcctggaacaacaacgcctccgtcctgttcctcgaccagcccgccggcgtcggcctctcgtcccgcagcccgggctctcccctgcaagcccacgacgtcgacggcgcggccgacttccaggcctttctcacctccgagattgtcacctctggcaactcgctaaacggaaatcccattaccggcattcacttttggggcagctccggtaagggcaagaagcctgccgtcatcctgcacggaacggttcacgccagagaatggatcacgacgttggttgtcgagtatttcgcctacacgctgctcacgagcactgatgctacgaccaagggccttctggacaaatatgacttttacttcttccccgtggtcaacgtagacggtaagccactgctggtctttgccctcgatatgaaagtcttcaccgctgacttgctgctctagggcgcgccaatatagcgatcgcggatccacttaacgttactgaaatcatcaaacagcttgac

SEQ ID NO: 135 - DNA, 150 bp, Artificial Sequence
  siRNA
ggtgacctgtttactcaatcgcacgctattagtctttgtatgctcatgacgagcgcgcagacggagggcgcgatgtgcgatctcgaactcgtttgcgatggccagacaatcagggtccataagctcgtcgtctgtttgcaatctctagtt

SEQ ID NO: 136 - DNA, 150 bp, Artificial Sequence
  siRNA
actgctccgttagcacaacccactgtggccgtggctgccaaggacacggcggctaccatccgcaagcgcagaagacgcgcccctgctggtggtgccacggacgactgcttcacatgctctaagcgcaatgtcaaatgcgatcgacgccgg

SEQ ID NO: 137 - DNA, 150 bp, Artificial Sequence
  siRNA
aggcgacaaaatcacagctgtgaccagtgccgaaggtcgaaaagaggatgtgatgctccctccttggaagcaggacaacgcagctcgaatctgtggcaactgaataacggtaatagctctttcaagtgctcttactgcaacaagaccaac

SEQ ID NO: 138 - DNA, 150 bp, Artificial Sequence
  siRNA
atcaaattcacgccaagaaacaactcccagcttttagccttgctgccaggcgatgcagataccttcagcgacatcgtctacctcattagtgaatatgaaggcgtcatggaccgcagcgaaagccttgcggccaatcttggggccaagctg

SEQ ID NO: 139 - DNA, 150 bp, Artificial Sequence
  siRNA
gacggcatgatgtctcaacccatgggacagcaggcgttctacttctacaaccacgagcacaagatgtcccctcgacaagtcatcttcgcacaacagatggccgcctaccagatgatgccctcgctgccgcccacgcccatgtactcgcga

SEQ ID NO: 140 - DNA, 150 bp, Artificial Sequence
  siRNA
gagcgacaaacggatcttagggtccagctaaatgccgaggaagaggagcggccagtcattattcgtgcttgcgacatgtgccgcaagaagaagatacgctgcgagcccacttcgcaaggatgcggtccatgcaccaaatatggcacaagg

SEQ ID NO: 141 - DNA, 150 bp, Artificial Sequence
  siRNA
gccctcgcagctcaacagcatactcaggccgattggggccgctggtctcaccagattccacagagttttcccatgatgggctctccaggattcatgtcatacgatcccagagctcaggacggcagtcagatgcagcgtcaggtgtctgct

SEQ ID NO: 142 - DNA, 150 bp, Artificial Sequence
  siRNA
ctcgacgagccagaaggagagactgcccccaaagatggccctcgcgacctgctcgaagagtttgccatcgagtctcactgcctggacgcgcccatgtcgatggaagacctggagcttctacgagcagacattgagtccgacaagtcgcct

SEQ ID NO: 143 - DNA, 150 bp, Artificial Sequence
  siRNA
gaattgcctgtcccggctactaggcgacgcgagacagtcgactgtttcaattgcgcagcatcacggcgatcctgtgatcgaacaaaacaccggtgcgatacctgcgcgaagtcgtccgagcactgtgagggatatccaagggcactccag

SEQ ID NO: 144 - DNA, 150 bp, Artificial Sequence
  siRNA
tcgtcgaatgatccttccgtccgtcgcattctgcctcaggacgcaccaaacgcacagaatgcaggattgaacagctacacctttgcgcctcagcaatttcctcagagggagactcagaagaactatgtgttcgttgacgagcacaatcgc

SEQ ID NO: 145 - DNA, 150 bp, Artificial Sequence
  siRNA
aacatgacgacaacgctgccattggtgggtggacgtgaggagaagccgcagcagacgcagacgcaagcccagcaaccacgcaagaagcacgcgaagctattccacaagaagagtcggactggctgccaacgatgtcgaatccgtcgtgtc

SEQ ID NO: 146 - DNA, 150 bp, Artificial Sequence
  siRNA
tcaacagcgactttcaggagggccgcaccggcgtgataaaaatagaccagttcgatcccgagactgtgagacgcctggtcgagtttctctacacgggagactatggccgccagcctcaggagcctcagcccgtgcaggagcagactcaag

SEQ ID NO: 147 - DNA, 150 bp, Artificial Sequence
  siRNA
ccgttaccttggccgcgaagaagccaaagctctgctccgccctcgacgagaggccacggccgccgtcaagagatggctggccagggctggtgttcctgctcatgatgttttgactgatgggcagttcatccacgtgcggacgcttgcgga

SEQ ID NO: 148 - DNA, 150 bp, Artificial Sequence
  siRNA
cgggaacacccaacgagaacgagccttatttacagtattacgaatttctgttgtccaagtccaacgctgaaattccgcaagtcattaccaactcctacggcgacgaggagcaaactgtgccgcggtcatatgccgttcgagtttgcaatc

SEQ ID NO: 149 - DNA, 150 bp, Artificial Sequence
  siRNA
acttcattggctctgacgtgcgtgtccgcgacgacaccatgcccactgccaacgtcgccattgctgttgagggtgtcagctggaactctgatgactactacactgctctcgtcgctcaggccattgttggcaactacgacaaggccatgg

SEQ ID NO: 150 - DNA, 150 bp, Artificial Sequence
  siRNA
aatggcaagcggaggatctttgcagatggcagcgcgtctgcctgcagcgaggcgggctgctacggcatcaccaagaggccgcggctggacgactgggggcgcgtcattggcttccacggcaagggccatcatgcggccggctgcgagcac

SEQ ID NO: 151 - DNA, 150 bp, Artificial Sequence
  siRNA
agttcacgcacggcgccatggagaactggggcctcgtcacctaccgcaccacccaggtgctctttgacgagaagacgtcggatgcccggttcaagaacgccgtcgcctacgtcgttgcccacgagctcgctcaccagtggttcggcaacc

SEQ ID NO: 152 - DNA, 150 bp, Artificial Sequence
  siRNA
gtgcatctcggactcgttaaccttcaacaaccaattcgatctggagctcaagcgatcaactgggctccgagggattgaccccaggagtctctttggtcgccagtccatcgacggaggctccaacggtgggggtagtggccaggaccttat

SEQ ID NO: 153 - DNA, 150 bp, Artificial Sequence
  siRNA
cagccaatggccaaaatccgtcagatgccaacccctcgcctctgcgcggggccctcgaccgctttgcgcagttcttcattgagccgctcttcttgtccagcactttggacagggagctccaggccgtcgactcggagaacaagaagaacc

SEQ ID NO: 154 - DNA, 150 bp, Artificial Sequence
  siRNA
tgatgactccgatacctttgacgaggtcggccaaggcctgttcgacatcacctacgtcgacgggtcctcgtccaaaggcgattacttccaggacaacttccagatcaacggcgtgaccgtcaagaatctcaccatgggtctcggcctgag

SEQ ID NO: 155 - DNA, 150 bp, Trichoderma reesei
tcatgggcaccgactgcgtgtccgaggcgtgctccctgcacgactccttcgggcccgaggactcggacactctgaagactagcacaaaagacttctccattgcgtatggatctggggccgtcagcggctctctggtcaacgataccatcg

SEQ ID NO: 156 - DNA, 150 bp, Artificial Sequence
  siRNA
cgagaaggcttttggcatcgacttccccctgcccaagatggaccaagttgccatccccgactttgcccagggagccatggagaactggggtctggtcacgtacagagttgtggacctgatgctggatgaaaaggcaagcggtgccgctac

SEQ ID NO: 157 - DNA, 150 bp, Artificial Sequence
  siRNA
gggagctcgagctgttcgactcacagcctgccaccgtctttggcctggacaaggagttcatcaccgccggcagaatcgacgacaagctgtgctcgtggtccgccctcctgggccttctccactccacagagcgggactcggacagctaca

SEQ ID NO: 158 - DNA, 150 bp, Artificial Sequence
  siRNA
gtataggcgccgtcatctttgctgcggcctggctcgcgtctctcgccgtcttcgtctctaccggatcgtacaagcacgcgagcgatgtggagcatgatccagacgccgactttcgaggctcaggcaaaccggtcaccttggagcagctct

SEQ ID NO: 159 - DNA, 150 bp, Artificial Sequence
  siRNA
tacgacgtcgacgaggtcaagctgacgaccgaggtcaacgcgacgctcgcccacctggccaatgccacctccagctcgaccatctacgccatcaacggccaggtgtcggaccacatcaccttcatcggcttcgagaacaaggactttgcc

SEQ ID NO: 160 - DNA, 150 bp, Artificial Sequence
  siRNA
ctgcaggagattgacatcatgaagaggttattcgccgcatacccggatgactttgctcacgacattgacagctccgatgccattgacgccttccgagccgggaagctcatctcccccttgggcatcgaaggccttcatcagattgccaac

SEQ ID NO: 161 - DNA, 150 bp, Artificial Sequence
  siRNA
cgctggccaagaaggcgggcgttgacgaggccgagctgaaccttttcctcgagtatgttgccatgttcctcggcaacatgggcaactacaagagctttggcgactccaagttcatccccaggtgcagcgagacgactgtcgctgctctgg

SEQ ID NO: 162 - DNA, 150 bp, Artificial Sequence
  siRNA
ggtggctttctgctgtgctgccctgacgacccccgatggccgcatgtacagcccggctgcggagccaaagtcttacacgtcggccaagatctacacatccctctttgtgcggcactgggactcctggaacaccgagaacaagaactcgct

SEQ ID NO: 163 - DNA, 150 bp, Artificial Sequence
  siRNA
agtctacacggcccttggcgcaactgccgtcagagctcacgaagtgagccacgttatccgagccaacatccagctgccatcacaaccgccagtgccgaacgcctaccgatcgcagggctgttggagctccaagggaaacatgacgcatgc

SEQ ID NO: 164 - DNA, 150 bp, Artificial Sequence
  siRNA
atggcctgcgtgagcatgctccagctcttgagctacttcaccaccgagggacagcagccgaaacacggcatcgtgctgctctttaacaatgccgaggaagacggcctgctgggcgcccgcgcgttcggttacagcccgctgctcaagttc

SEQ ID NO: 165 - DNA, 150 bp, Artificial Sequence
  siRNA
acgccaaggcatccgatgagacagagtcctctgaggaaatgttgatccacgtcgccatgttcacgctggcggacaagtatataatcgatgggctgcgcactctctcacagatcaagttcaaggcggtcgtcacgaagcaggagaagccca

SEQ ID NO: 166 - DNA, 150 bp, Artificial Sequence
  siRNA
agagcagctggggaagcgtcggctatgctcccagccttgtgcactcgccagacggaacaccaagatataccagatatcctctccatctcagcaccgatgcgctctcctcgtcgtgcgagtcggtcggcagcgaggtggactacctttctc

SEQ ID NO: 167 - DNA, 150 bp, Artificial Sequence
  siRNA
aagttcaaggacggcagctccctccaggcggtcgacgaggccattagcggcctcgtctccaacgccgaccacgtctaccagcatgtcttccgtgggtttgctgccactctggacaaggagactctcgaggctcttcgcaaccaccctgaa

SEQ ID NO: 168 - DNA, 250 bp, Artificial Sequence
  siRNA
ccgttaccttggccgcgaagaagccaaagctctgctccgccctcgacgagaggccacggccgccgtcaagagatggctggccagggctggtgttcctgctcatgatgttttgactgatgggcagttcatccacgtgcggacgcttgcggagaaggctcaggctctgcttggattcgagtacaactcgacgctgggttcgcagacaatcgcaatctctacccttccaggaaagatacggaagcatgtcatg

SEQ ID NO: 169 - DNA, 250 bp, Artificial Sequence
  siRNA
acttcattggctctgacgtgcgtgtccgcgacgacaccatgcccactgccaacgtcgccattgctgttgagggtgtcagctggaactctgatgactactacactgctctcgtcgctcaggccattgttggcaactacgacaaggccatgggcaacgcccctcaccagggcggcaagctcagcggctacgttcacaagcacgacctggccaacagcttcatgagcttctccaccagctacagcgacactgg

SEQ ID NO: 170 - DNA, 250 bp, Artificial Sequence
  siRNA
aatggcaagcggaggatctttgcagatggcagcgcgtctgcctgcagcgaggcgggctgctacggcatcaccaagaggccgcggctggacgactgggggcgcgtcattggcttccacggcaagggccatcatgcggccggctgcgagcacgagcgttccggccttgtgagccctgctgccgccgctgccgaggccgaggccgcctcgatccacgtcaagaacctcgcctttctcgtcatccgcgagcggg

SEQ ID NO: 171 - DNA, 250 bp, Artificial Sequence
  siRNA
agttcacgcacggcgccatggagaactggggcctcgtcacctaccgcaccacccaggtgctctttgacgagaagacgtcggatgcccggttcaagaacgccgtcgcctacgtcgttgcccacgagctcgctcaccagtggttcggcaacctcgtgaccatggactggtgggatgagctgtggcttaacgagggcttcgctacctgggttggatggcacgccgtcgaccacctgcaccctgactggcaggt

SEQ ID NO: 172 - DNA, 250 bp, Artificial Sequence
  siRNA
gtgcatctcggactcgttaaccttcaacaaccaattcgatctggagctcaagcgatcaactgggctccgagggattgaccccaggagtctctttggtcgccagtccatcgacggaggctccaacggtgggggtagtggccaggaccttatttccagcattggacaaacggctggatgccctacgacgaaaaaggtggccttggtcggcattgcgaccgactgtacctactggaacggcttcaactcatcc

SEQ ID NO: 173 - DNA, 250 bp, Artificial Sequence
  siRNA
cagccaatggccaaaatccgtcagatgccaacccctcgcctctgcgcggggccctcgaccgctttgcgcagttcttcattgagccgctcttcttgtccagcactttggacagggagctccaggccgtcgactcggagaacaagaagaacctgcagaatgacacctggcgcatccaccagctcgccaagtctctgtcgaacccgaagcaccctttctgccacttctctaccggcaacctggaggtgctcaa

SEQ ID NO: 174 - DNA, 250 bp, Artificial Sequence
  siRNA
tcatgggcaccgactgcgtgtccgaggcgtgctccctgcacgactccttcgggcccgaggactcggacactctgaagactagcacaaaagacttctccattgcgtatggatctggggccgtcagcggctctctggtcaacgataccatcgaggtggcgggcatgagcctgacatatcagtttgggctggctcacaacacctcttcggactttgtgcactttgcctttgacggcatcctcggcatgtcgat

SEQ ID NO: 175 - DNA, 250 bp, Artificial Sequence
  siRNA
cgagaaggcttttggcatcgacttccccctgcccaagatggaccaagttgccatccccgactttgcccagggagccatggagaactggggtctggtcacgtacagagttgtggacctgatgctggatgaaaaggcaagcggtgccgctaccaagcagcgcgtggccgaggttgtccagcacgagctggcccaccagtggttcggaaacctggtaacgatggactggtgggagggtctctggctcaacgag

SEQ ID NO: 176 - DNA, 250 bp, Artificial Sequence
  siRNA
acgccaaggcatccgatgagacagagtcctctgaggaaatgttgatccacgtcgccatgttcacgctggcggacaagtatataatcgatgggctgcgcactctctcacagatcaagttcaaggcggtcgtcacgaagcaggagaagcccagcgtgatgccacagtacgtcaagctcgtgtacgacctcgagtgtgagagcagcaagaggctccgcgacgtcgtgattgaggctgtccggctgagggtcgc

SEQ ID NO: 177 - DNA, 250 bp, Artificial Sequence
  siRNA
agagcagctggggaagcgtcggctatgctcccagccttgtgcactcgccagacggaacaccaagatataccagatatcctctccatctcagcaccgatgcgctctcctcgtcgtgcgagtcggtcggcagcgaggtggactacctttctcctctgagccaatcttatgctcgcgaagagattcctttcaaccacagcccgactgtcctgtacgagggatatcctgcacagcatagctcccctattgcgca

SEQ ID NO: 178 - DNA, 250 bp, Artificial Sequence
  siRNA
cctggtgctggccgcccccgccatcgagaagcgagcagagcctgctcctctccttgttcccactaccaagcacggcctcgtcgccgacaagtacattgtcaagttcaaggacggcagctccctccaggcggtcgacgaggccattagcggcctcgtctccaacgccgaccacgtctaccagcatgtcttccgtgggtttgctgccactctggacaaggagactctcgaggctcttcgcaaccaccctgaa

SEQ ID NO: 179 - DNA, 250 bp, Artificial Sequence
  siRNA
tttagcggtggctcaactgcgcctcgaggactgggaactcagtcctcatccacctccttcagcacaattctcaacgtcaaggaggtcaccagcggtctgcagggcctggccaacacgtacggagttcaaactttcaacactccttacaagacggcccagggcgcaaccgtcgtcggagccaaggtcggcggtaccggaggtaactgtaccgatgcctaccgcgtcttcttcaacggcaacatccacgccc

SEQ ID NO: 180 - DNA, 250 bp, Artificial Sequence
  siRNA
tgcactctggcgaatttgacagcactgagcgactgccttatcttcagcatggaatcgtgccaatcctgacaaaggcgacgggaggagtcggtctcatcatggagcatcgatactacggcaccagcttccctgtccctgaccttacaacggaaagtctgcgcttcctcacgacggaacaagctctcgcagatactgcctactttgcaaagcacgttcggttccccggtctggagcatcttgatcttacggc

SEQ ID NO: 181 - DNA, 250 bp, Artificial Sequence
  siRNA
gaaaagtcgagcgacgccaagtcctggaacgttgcgttcaaggcctctctgaccgaagacgttctggaggaggatcctaccaccgctgccaaagacaagatcccaacgttccacggctactccgccagcggcaacgtcaccggctcctttgtctacgtcaactatggaacgtaccgagactttgcagatctagtcgaggctggcattgacctcgagggaaagattgccattgccaggtatggaggcatct

SEQ ID NO: 182 - DNA, 250 bp, Artificial Sequence
  siRNA
gcctcgtccctcaaggagtcgtttggcgagctgacggccgacgcaaaggccgtctgggacgaggtcgccatgctggcccccgacgccatggcggccttcaaggagcaggtcaagggcatcaagcccaagaagcacgaccgcaagcccgacggcgactgggaccacgtcgtcaagggcgccgacgtccagaagctgtgggtggaggacgagtcgggcgagccgcgccggctggtcggcggcaagctgtcca

SEQ ID NO: 183 - DNA, 250 bp, Artificial Sequence
  siRNA
tacccgccattcgacgccgtatacgacggcaagctgatctggggccgcggaacatcagacgacaagaacagtctcaccgccgttctatcggcattcgaggcgctgctgtccaacgacgactgggcgccgaagcgcacctttgtgctggcctttggattcgacgaggagtgctcgggctaccgtggcgccggcaagatctccgaggtcctcaagaagcggtacggcaaggacagctttgccgccatcctgg

SEQ ID NO: 184 - DNA, 250 bp, Artificial Sequence
  siRNA
cgaccccgtcatcgtctggatgaacggcggccccggcggcagctccatgatgggcctcttcaacgagctcggcgcctgctggctcgacccgggcgcaaacgccaccgtcccgaacccctttgcctggaacaacaacgcctccgtcctgttcctcgaccagcccgccggcgtcggcctctcgtcccgcagcccgggctctcccctgcaagcccacgacgtcgacggcgcggccgacttccaggcctttctc

SEQ ID NO: 185 - DNA, 250 bp, Artificial Sequence
  siRNA
acctccgagattgtcacctctggcaactcgctaaacggaaatcccattaccggcattcacttttggggcagctccggtaagggcaagaagcctgccgtcatcctgcacggaacggttcacgccagagaatggatcacgacgttggttgtcgagtatttcgcctacacgctgctcacgagcactgatgctacgaccaagggccttctggacaaatatgacttttacttcttccccgtggtcaacgtagacg

SEQ ID NO: 186 - DNA, 163 bp, Artificial Sequence
  siRNA
gttcgtcgctgccaagtggtgcgaagtcccgtcaggccgacccaatccactgaccgaatgagccttaggagtagtcaacactgatgatcaagacactccagggcgcgccaatatagcgatcgcggatccacttaacgttactgaaatcatcaaacagcttgac

SEQ ID NO: 187 - protein, 791 aa, Aspergillus niger
MEPTSKARIRKTPPVSAPAPRKRRRRTVVSQAADDCFTCARQGTPCDRRRPFCSQCLDSARNCAGYKTALTWGVGVASRGKLRGLSLPVTGAQPAVAPPKLPRATGPRAVSKSQPALDTAAEKRRLHDKQRSSAAGLTEHGSVSIPPTSQRRLCSPEYYTVDSHVKPNHHNPYSSRATKTDSLKQYHAPLVANPDSSRAWMGLEQTPVPIQCPWPALTPEQKDNASDEQHEETSYNEVSPRMSACQPPSLSQQLLARSVGRTPRLRYLISYYAEVIAPMIVAFDSPTNPFRTYILRLAQESTSLQEAIATLASCNLRQRRERGTRSTERTLPGRLSSMAHQALTDGALQDRTGIFMPEDYAQEEQYHRGMAVSALNRELADSHQRLSDSVLATLLILCLFHGCDTGVAQFKTQFAGVTKLLAIRLCNSPCMSDELKWFVRMFTWIDTMTATTNDREVQLRGACLDITAASDGEWGLENLAGCDAGLFRIVAQLGRLNLLSQNQEVRTSTPPDIHIPSTTLPPSMAFFPSNIPATSSGPFAFTLPPLPPPGDRDRGQLPPAFWAEWYSLRQKLESWRFVPHQSQSQSPLFTSSHAYISPPSSPTDQPVVAAHNLKDVIHISESFRHAAILYSERLAYPDLPSDHPRIQNIVQHIMSHIMTVQSDAYLLWPLFITGSECVRADHRAIIRQRCKDLSRDSGFFNNLSCLQLLEKIWAENPAVDVIPVVSSLDFGLQAAASGCVSEVTFLPPGSWASSQHEAFMSPTLPSVSRKQGFRWHEAMQTKRAEDEYMTV

SEQ ID NO: 188 - protein, 639 aa, Aspergillus niger
MESRTATAEPSSKRPRSPSGDFPPIASKVPKTHSNHLQINYLARQYPDNLPLVSVDDTMPAIVHLIGEYDGVLHRHESIAGNLGACPLGPILIKRFERLFDGPPRVLKSHGKDSPNVTWLDVVEFAKNKPEQFNLEKSRNGVRVCQFYTKQCRVEISEEDFVLIASGMPQKMIPPQPIIEDEEKELGALEILEKNLQQIIQMADQVSARARQLNHRLKNRRTAIVTRRENDMSLHSQRQQQQQQQQQHRSISPAWRDANGHAQNPNGSTPASAQSPSTGFVAVNAGRPGGGEATVEENALSSQFMFSHSNTDNVTIINGTSIKGASPTTRAELMKKFFTTQDRQARSIEEGPGSNSRQSSRPRPRASDAADYNLYTPAPTTVAIPNTPSSLLPPPKSHHHEKDDGGPHKMEMVARMEELQRGERILPPCDRCRRLHMDCLKNLTACMGCTKKHAKCSWKDVKEDELRETRVDRTSRERAEEPPSSKEASATHPLPTPVAAPPSSTAAPTPVSGPLLPETEPRPREREIASEYSVRRESAPTGGPIAGMALAKETSPRRAMSEMHGSSGMSHERRVSLHRHAEADDDDPDANQRLMQAILDTVDHHTRVAAAVKEGHEVSNEREREREQERERERKLVRA

SEQ ID NO: 189 - protein, 846 aa, Aspergillus niger
MTNTAVSTTSPTPQSTVETEAKSKRKASTAGLPANARPCGVMWSKMVHPAPIAAWTKKSRVEVENANPHQLSQSPAEIPDDGASLFRRLSECHGLSDMAPASPSQRSVDLDQGQHMPHLLYQSQANRIGSGDRFRRRMAPNPAVPATLPLHHVTSQIQQLLDPSFANARSGGVVLPDYIRGLPPRLQKEDIDYLSMKGALTVPDVGLRNELLKSYIHYVHTYMPLLDLEDFLQTIVQNDGIRRMSLLLFQAVMFAGTAFIDLKHLHAAGYPTRKAARKAFFQRARLLYDFDYEVDRISLVQSLLLMTYWYETPDDQKDTWHWMGVSLSLAHTIGLHRDPGNSRMDVRRQRMWKRIWWSTYTRDRLIALGMRRPMRVKDDDCDVPMLTLDDFEFHPFSPEIVSMVGNSEILQSVSHQRELALMFIEKAKLCLCVSHVLSAQYSVLSHKFGGTMETTMMLVPKKSAAETFEVRRCDQELEDWLAHLPTEIRYAPAAPSKLNEAQEVLHSHRALLKMVYLTTSSALHRPQVLPAIPFPSMDAELQEISRNKVRFAAIEITNIAQDLHSLDLTRYFPTTGVTVLLPAVIIHLLDIKSSDHNVRMTSLHRFYQCMRILQRLREIYASADFATSFLEAAIRKAGIQLTVAPQDVQARTNNIVDTSARVNTLTPPPDSLAQKIPDLTYPKSDGARRASQLPKESGPEFASTPPPSDGSENGSTSNINPSYHQDAFTIPNFDSELSISELMDLANDAEVTQNDFDALINFDDAGADFLAPDDGLNTGNGNGKNYGFGLGTMNNLSDIMGFDAEKQGVDLTGLGDGQLADDRAAASRNDMNTFAADLDAELGLSL

SEQ ID NO: 190 - protein, 859 aa, Aspergillus niger
MQGFTFTPPTGPPREGQKNYVFVDEHNRHKRLKVMRACNGCRKRKIKCDAATTNTWPCSACTRLKLVCVPPTIGHDGEYPAAENVETNPVDSLGASNAAEPSLSSYPSSQAYRDPGPPSMGGMHPYNDNIGIYPQFAHSTPGQPNVYDMRSSQVAMPHHQYTQSQMFSNDQTQPLGTAESDIYTEHDQSTAENLSEVLGELKIDETGIAPYIRQQRRERAEPEIPTQDEVDEKLPPLSTGAGATIRIPPELMPSDDEVMNYFKIYFDDIHPYVPVIHRSHLYYQWQHERSSISPLLLEALFACAGRLSDDPAQGAQWLALANRHESSFMDEPRLSTIQALLLLLKARESRPKKGYYYRSWQTVKTIISMAKDLDIHEHNNLHTEGRSCDLNPVECLVQTRVWQALLVVEVMIGAPQGRSDYGVDHETVNMSPTLDIRGLDQFELDRSRQYAYFVRNARHIRIIADIYHKIKKQKDWGANPKFVEKNPLFTDWLQSLPPDLQVNYPPDGSPPWIPSHFVGNMHSHCHLGIILLHRPQLIASKSFAAGGGWKMHMALCYSSAKYLCRLQEAILNRFGLSGLLFMQRGINFTIYTILTCTMLHLVAITSPDPNFHTDAREYFTRHMRILERCSSAWPMPELQAQIDSLRFAFSADVNRPFELKPTFPYGSPSEPYHPSPPLDSHYASQINQVPGVQSRVGYAAYPVTPPISAGTEDSKSDSSQLQPLGLIPSQSISTHGLNAPLVDENSWDPTRIINQWDMAFSIGTPTVTTNSPPMALSNPAQTVQPSLPDHFPVQYEQQSKVTPVAPAPMPHTQFTGQQVLFTARDWQQSVASVYDPNGLKRRWNYSVDLGTESTSKRQR

SEQ ID NO: 191 - protein, 222 aa, Aspergillus niger
MHLLAPLKSMATNLSTLLAILSNIRNGIYSDVEIKCHSSTFKVHRCIICPQSEFFEKALCGEFQEAKTNIVTIHDDPTIIKKMIDYFYRGDYDDSPDKSHLATNPDYESPTTKAHVNIEMYNVADKYAIEPLMALAKKKLEYRLTLVWDNKEFIHIIEKVYGLDSPQNSKLRETIAKFAVEHLATLIKLPRFDEVRIEFPLFSYDFSTSLIQRMARVETKLR

SEQ ID NO: 192 - protein, 866 aa, Neurospora crassa
MTAPINAPPAATAKDAASARKRRRRAPAGGAADDCFTCAKRNVKCDRRRPYCSQCLEIGNECSGYKTQLTWGVGVASRGKLRGLSLPIAKSPPVNPGKGVTALKSPTTRQRTSSVASVSQYSETEDRVKREETEQPSSVDLHSPLHSPLSGPPFHHFDMSHMSPVTEAPPPGWTHIPFTSPMSPHDGSGYPGRSMSLSMASHMDSISETDYMSPIAHSFPRDDVSYIHSPLQSPTAVYDSYPGHGTSVQHTHPSAVMIESHRPPTSCPSLGYSPSEPTASLPLRVSPVDSLEAQLSRKMVQECDVFVPRTPSDLETFSTSVQSHGPFWAPSNADDESLSQSVHEHNQLPWPTSFPSQSPSPILRVSPDLIHKMPFFMDYYEKTICPRMVFIDNPSNPFREHILQLGTTSRSLQHAICALAACNLRIKRRLSLGQHMRDVGEKRLDASPFDGYSDTQPEDQSLSEEYQHRNLAVHLLNEQLNDPEKSTHDSVLATILILCHYRMAESGVAKFQTQFAGVKKILGLRRMSSYPASRDSAWMEALFTYFDAITASVNDREAQLNTSFYGLLPDSQLLPPGTENLVGCDRELFKTIVKLGRLNLLSQHRPVQNLLANAQRARANSLCGTPSPLGGGGFKSSPSEHHHLFGSFQPMRFEGSGLGSTMEDDEMTGIGHTSMGYDDHGSTFWREWKDARTALQSWEFDASRVVASLAPTLSPPPTGSQVRDLGSLSEAFRYAALLYTERLASPNLPSSHSHFRDLVSQVVYYATSLEAGSSAEKFLLWPLFVAGSECVNVLQQNIVRSKCRDIMARSGYMNNMAALDVLERLWAEDVKENGPGAKMRGMMRSGPFNWSRCIGGPGVDVEWIMF

SEQ ID NO: 193 - protein, 507 aa, Neurospora crassa
MPAGVHNGKSGDGSPGPGPSKRKRDLDDNGIPGLTRPDRIPQPRPPQSGNTTPINYLSASGIKTSSLELLRGDNCAFNKVISLISDYEGVLSRHESLAANLGAKLTAPRLLRAMESLFEGEITVYAKTSSGMDQPYKPSWLDILDFAAANPSEFNLTTITSRGRVCRFSMKNVDVEITEDDWRLIRSGALDRFSLVPPKPLEEDDGIELVTLDIVEDRVHRIIQKADEIAAKARQLNYHLSGRKAAIGARYTFQHSSELNHYPKRHSELKPDPDLQAYLLRQFLSRAAQHAETSNLGKSGSSPSFASSNHSQLHLRQAGIVRSPPMPTSSGTLAPLQQLAGSIHMENSVLQDPAHRLSWGSGALERHTAASRSGTRAIERLERAASTSPPCDRCRRLQIPCVEYMGSGCQGCADNRERCDWQATTHNEIFALLGTNTPQEGRPGIAAEAVADQEVSKCSSTRAENSNGLGTAHRSNIKDGEQTHGEDTDGRADAAEDSREGIGRRPG

SEQ ID NO: 194 - protein, 575 aa, Neurospora crassa
MEDIMAQPFIFYESDASPERQQRQHIFNPFPYQMNMLPVVPPVPSTPIYSRRNSGCLQSPMQHKPFLNLDSITSMPVPQVLTPMASPQPISHARPAIKLQTEMGDYCGMPPSPPLTRSNSAASSPRSCDLLQTPCNPMVSGMDGLEVKPAGHEMKPYSPPLTPVYLPDQARIQVPMLPSNDLSLNTPTPTASGLLTPTPTYTTLLSPAASPLVQPASIFPVPVDGVCDPRELTVGTVNSTLAPEYFPTIYSPDEEDRDYFSQGIAPQRLATPFDYSFNPQLTAGLPVFDILSVLTDIDSEDESPFTSGSCSLVESSPSVSSRSRSSSGAASLDQSSLFCDELEDMHDVESVEDDCCSDSEARPSKRARHARKSTMDVAADNQTASTEKQAPASEHTQQAASAEAESNNTESNATTESSVEAGEQASTPLPVPTNRRGRKQSLTEDPSKTFKCDICNRRFRRQEHLKRHHRSLHTQDKPFECGECGKKFSRSDNLSQHARTHGSGSLVMDLINDPELMGMHHPGFIHHPMMGPALTSEDCHTFGKVLFQVASEVPGSGSDSSDDSDSNKKKRRRGE

SEQ ID NO: 195 - protein, 507 aa, Neurospora crassa
MALTAQPSAPAGWERWPQHHPSNDYVMMDADVMPYNARPMTTAPMQQRPSLVPHYMPTTSMSTASINSISAPAHYQSPVPYGGGYPAYPLPTPTTMNSSYHKHQQYQERPSLHMITPEFEDTRGPHHIRNARRYSEESRSPSERSDSQGSTTETTISNHSSCSRTITPNTPVNGAPQVEFSTAVDKLMKVIQSKMKDADPEQSGDDKDIKAEQQSSPVCQARVQQPADKHKRKRYECQIEGCNKKFSQKTHRDTHVRSHTGDRPYVCPIPGCGGRFTQAGNLKTHKRRHTGERPYRCEVCDKGFVQRGDVKAHMKTHLGTKAFLCRLDNCHKQFTQRGNLKYHQNKYHNETIKALAARFDAIEDWSTVLKEDMEIFKDFAEVHKNSNKGIKGRGKHRKVKSVPLSSPTSPTGHSPLPNIMASQYPLPSAPGVSQLLHTPHPLHPPLHHQGPSHSAMYGMPRSSLHSHYETYDHHEVDTVASSRGSVAEPIYHHEEHPRELAFGDRMY

SEQ ID NO: 196 - protein, 862 aa, Neurospora crassa
MSDSGEGSQCTPSPSPSTENESTGPVCTSPCEEKPSSLARIEAATPSKKRPSKALPADSQNPRPAKRRAARACLTCRNRKVRCNVVEGGLPCNNCKWGPGRMKNMLAGQAVPNGVAAVGGEFGARTLGHQPILSSQQLAAHANASLMADAQATQTQGLWNNPSIPETSARLWQNPQLMTTMPGNLTNPSATAVNPRPTPISVSTPPSQPFLQPNLQPKPNRTVSPNLPNFFKPLPPKDAVDVQYMMAKGAFTIPTPEVQNAMLKAYIEYVHPYMPLLELRQFLTAIHSNGQSGQISLVLYQAVMFAGSNFVAQKYLDAAGLGSRRNARKELFMRTRVLYDCDVEKDRLDLVQALLLMTYWYETPEDQKDTWHWIGVAISLGLTIGIHRNPANLAMPPAQKKLWKRIWWCCFMRDRLIALGMRRPTRIKDEDFDVPMLEESDFEIVELPADNQLLGPNCAVVRNVATQRQLARLCIQKARICVAISHMIKTQYTVLNHDGGLPAGQTTSGTTMLFPNKSLNNIQEVQKVDQMLESWRLQLPEDCQYRPLLTEALAEEDQPVAVHRTLLHMVYHTTVSALHRPHYLTMEQAATQPAQTSLIAQQARSKVHHAATMVTRMAEDLLRHGLAKYLPTTAVTVTLPAMTVHLLHSRSPDPELSQQARRDFEVCAKLLLQLRGMYAAAEFAHGFLMGVEARHKATAVSPQGPQAAPVSLGHQVHLGPQKEPTPPPETTSFSPSTNTTFYRPPQADAMVSGVGHGPGALVLVNVDSGGSTPPQTDVEDMSSAGLTPPVDTTAYEEVQTTAMECDTNGAMANYFDDAFGSILDPEAVEGDFMEAFTMSHENDDEWMFDGPCNSNVVPAAVC

SEQ ID NO: 197 - protein, 894 aa, Neurospora crassa
MSNDPSVRRLLPQTSQMGAFTFAPPAYQQPPRETQKNYVFVDEHNRHKRLKVMRACEGCRRRKIKCDAATTNTWPCSACIRLKLHCVRPNGFDGAAEPQVYEPPRAQFDSSPVPESYHQQQLALTDHQQLLTHAQAPKATPIYPPQTSFQDTAALYHTVPYTQPQAVPQNLQYAAVHSAYATPDSFPTPPSMHQVPQVSQLPQISQHPSSPEDFQSEYAQQDLADLLGSLKVNEAGTAPYLNSKMRSADDEEPSVEETEEDQFTKNLPPLTAGKIRIPPALMPSEDLCLHYFDLYFTHTHPYVPVLDKNQFYHQWHNNREAISPLILEAIFAIANRLADDAAQGQQWLYLATRHADSFLDVPRLSTLQASLILLKAREQAPKKGYYYRSWMSIVQCVTMAKDLGLDEHYADHQAGRSCGLSPAECQLRDRIWQTIFIVEIMIGTPQGKTDLAVEEETVNFEVPRPLPNGDTSEYHVSRNFVYFSRVVRNVCRMSRVYSRLKRNKEWGIDPEFVQIRPAMDAWLTDLPHDLQLDFPVDGSPPWLPSSFVGNMHSYYHLSIILFYRPQLAHMTPTGTGGQWKQHMLVSYRAAKMLCRLQEGIINQFGIAGLQCMQRGINFTLYAVLACIVLHLVALTSPDPALNAESREYFTRHMRVLEKCMGAWPMPDMQRQIDSVREAFSQDIRKPFVLKPSFPYGSPSSTSHPSPPGPSYRSDMSRTSSIDHQLDTHVQHSHVSYTTHPLSPPISIGPMDSKSDSHDLQSLAMMSSGHGTQASSMAQTMPLTDAPAWNPSRIFDQWNAQFGNPQVQHPSQLTNHASPLSLPSSGASETSLQDLQAAQAQLSPVSQQMPQYPTNPVQTFVTPAMWQESVASVYEGGLKRSWGDYDGHMPVKRNR

SEQ ID NO: 198 - protein, 938 aa, Myceliophthora thermophila
MTAPINTPAPPAAKDAASARKRRRRAPAGGAADDCFTCAKRNVKCDRRRPYCSQCLEIGNDCSGYKTQLTWGVGVASRGKLRGLSLPIAKAPPVSSAKTVKSPTTTTTTAPRARTGSVASTGQWPQEQDDRSAREEVEVKMEMDHRRNPSASLTTPQFPPPPYDMSHLSPTETAPPGWTHIPFSSSIPTNDASRFPPRQIHIPVSSPGDMMQRELIQTPIDSMSDVDYMSPLGHSFPREEVPTFIHSPIVYESFPSHASPGPQSPVAAMMIEHSRAPAPCPSLVYAPSEPASSLHSQLSHVDSMEAQLSRKMPQDCDVLVPGTPDLESYSSSAQSHGPYWTSSSVDEESVSHSVPDRTPAPWPGSFPSQSPSPVLQVSPDLITKMPFFMDYYEKTMCPSMVFIDGPHNPFREQILRLGTSSRSLQHAICALAACNLRMKRRLSRGHHGRDVGERQLDRTSPIDGSSDGQPMDQSLAEEYQHRNLAVRLLNEQLNDAEKSIHDSVLATILLLCHYRMAESGVAKFHTQFAGVKKILSLRRMSPYPASRDSAWMEALFTYFDAISASVNDREPQLTTTFYGVPPDTQLLPPGAENLVGCDRELFKTISKLGRLNLLSQHRPVQPLYSPSSLPRVAGSRSASPLGAPFKPPPPPQLNGSDHHHHHNHLQPHGMLGGLPHPINSSVRFDGPPHGFGGAPNHLEDDDLLSPGHLQAATTPYDDPRSMFWREWKEARQALQSWEFDAARVRASLAAAMSPASDPSSGGPVSVSATTLQQQAPTNGQVRDLGSLSEAFRYAALLYTERLASPNVPSDHNNFRNLVSQVVYYATSLEAGSAAEKFLLWPLFVAGSECVNELQQGIVRAKCREIMARSGYMNNMAALEVLERLWAGEGDAVRNPHHHNQHPYSQHQGGGLCGKGKGGPFNWAKCIGGPGVEVEWIMF

SEQ ID NO: 199 - protein, 569 aa, Myceliophthora thermophila
MEMEILMAAQQSGPAFFFYNPDTSSESRQHGHFLPQQHLQQHSALQQMQMLPVVPPLPSTPIYSRPGSSSSQPPLLPKGLTSAPTLPSTLTPVASPMPIAPKPTIVLDTELCESEGLGSPLTPPLSTSGSAISSPGSCDMLQTPLNPMLSGLDGKEACGSDGDLESFPSFDWSACASPPLTPVYLPSQTQASKIAPIQTQACDLLSPASSCPSLSPSPSPYARSSSSESFCDPRNLTVGTVNSTLAPEFSALPTLCAGEDEDQKFVLRGASPAISPDSSFDFRPQSNNDLPSFDALSDLDSEDDFVNGLVNLGDCTEEAQPSRSRASSDALSPNASSDLCADEAGDAFGLLTPADSSDDSDSHRDKRQKKTGKPTMSTAATSQAGSNQSQSPPSNEGSTSSNATEAKNESEANSGSENAGPAPLPAPTSRRGRKQSLTEDPSKTFVCDICHRRFRRQEHLKRHYRSLHTQEKPFECSDCGKKFSRSDNLAQHARTHGSGAIVMNLIDDPDAIAAAGMPGAYPAHPALMGDQYSLGKVLFQVAAEIPGSSSELSSDDGSDHGKKKRKRAE

SEQ ID NO: 200 - protein, 874 aa, Myceliophthora thermophila
MSNDPTTRRLLPQTSQMASFSFVPPAYQQQPRETQKNYVFVDEHNRHKRLKVMRACEGCRRRKIKCDAATTNTWPCSACVRLKLHCVRPNGFDSSDSQVYEPPQPQIEVQHTPDGFGQQPPPIQSQQLLAHAPKPGALYQSQSSYQDTSGLYHPVQYGEPQPVPHGLHYSPVHHQSVGAVDQQYAAQTAAFPTPPLQHAPNPGSSEETYQSEYAQQDLADLLGSLKVNEAGTAPYLNSKMQSARDEEPAVEEDGDEYKTSLPPLTVGPGSKIRIPPELMPDDDTVLHYLDLYFVNAHPYVPVLDKNHFYHQWHNNRDSISPLLLEAIFAIAGRLADEPAQGQQWLAMASRHADSFMDVPRLSTLQALMILLKARESAPKKGYYYRSWMSIVQCVQLGKDLGLDEHYAEHQAGRGCGASQAECALKTRIWQTLFVVELMIGSPQGRTDFKIDEDSVDFNLPRPLPNGDESEYHVSRNFTYLARIVRSVGRMARTYGRLKKTKDWGIDPEFVQLDPSLNAWLAGLPADLTISYPADGSPPWLPSAFVGNLHSYYYLSIILFNRPQLAALSPSTPGGQWKQHMVVSYNAAKMLCRLQEAVINSFGLNGLQCMQRGINFTIYAILSCIVLHLVAITSPDPDLNSEARDYFTRHMRILERCMSAWPMPDMQKQIDSVREAFSADIRKPFVLKPTFPYGSPHSATHPSPPGRPLDSQMQHSQVSYTSHPLTPVSVGPPDTKGESPSVQSLTTMASVHGSQAPGVGQTLPLSEAPAWNPSRIFDQWNTSFGTPQIAQPSPPSVAAQANSLGGVESSGLQNMHTVHQNQLRAGAQMPLPPYTPAPPQTFVTPAMWQESVASVYEGGLKRAWDYDAHLPMKRH

SEQ ID NO: 201 - protein, 841 aa, Fusarium oxysporum
MTAAMSQPTVTVKDPSAVRKRRRRAPAGGASDDCFSCSKKNIKCDRRRPYCSQCLEVGSECSGYKTQLTWGVGVASRGKLRGLSLPIAKAPPVTREPRKQSTASSRSFAIARSVTQVASAPTTPFAMAGYDYLSIPHPEHAAPIHQGNWGSVNYSPAQETAHNLHRFPVPLVTENLSSSIDPLTPDVGYVSPMSQSYTRDDVSYVHSPSYMYDSYTTGTSSPGPQSPPASLYAEHTRTFAPTSCPSLAHAPSEMSSSLHSHTDTFDSQMGNRMVRDCDSFGVPEVDTYGASYSSMPISWQSPSMQDEDVKSHHSDFAPSGWPTASENHSVHVSQDLISKMPFFMDYYENIMCPSMVFIDGPHNPFRDHILRLAVNSQSLSHAICALASCNLRMKRKLSLGRDTRDLSEKLMADKHAAEAMADTQSDDLSLAEEYQHRNLAVHLLNEQLNDRTKAIHDSVLATILLLCHYRMVESGIAKFHTQFAGVSKILALRTQHLATSSNSAWMEAIFNYFDAISASINERESQVYPGFSGVSDSQLLPVGAENLVGCDRELFKTISRLGRLNLLSQNRSVRKAAAAYGAQEVPERSPSLSYISPLGHARRESLTGFNVNDQIGDMSNVTSHGLGDGRSNTAVHEDRTTAPISAPGLAPATSYEEGRSLFWHEWKEARLALQNWNFDAPGVSASLPEPCTQSQLRDLESLSEAFRYAALLYTERLVSPSLPSGHQSIQSLVSQVVYYATNLDTGSSAEKFLLWPLFVAGCECVNELQQNMVRSKCRDIMFRSGYMNNLAALEVLEKLWAQDWAGGEPLMLGTRTGDQRGPFNWTKCIGGPGVEVEWIMF

SEQ ID NO: 202 - protein, 798 aa, Penicillium chrysogenum
MASDNVDSPMRDAAPKGKSRKTDPNAPIRKRRKRTVVSGASDDCFACSKRGARCDRRRPYCSQCLDLGRECSGYKTTLTWGVGVASRGKLRGQHLPVMQSEAQSSGNAARSQSKASRSGDPSSSRMPDNASAPPSTGPAMASFEARTPSVKLEGSPSMMPAAFDMSSNLAWTMDMPDPQSWSNTLAGPPAISGLPSPSRPMIPSNTSQNMTSEPPLLYAPIQSPTANYGSLVWPTAVRFSSHAATPPASQADEEDVKYDPNYHVFWNAAHSPSLSQLLLARSVGRTPRIRYLISYYAEVIAPMIVAFDTPTNPFRTHVIRLAMESEALQEAIATLATSNLRQRREHNHLSTERTLPARMSSMAHRALTDEDFQDRYGISMVEGYIREENHHRGMAVKALNADLADPRRRLSDSVLATLLVLCLFHGCDTGVAGFRAQFAGVTRLLAIRMRHSRVVTDELKWFIRMFSWFDTLTATTNDRDVQLRGTCLEISSITDGEWGLENLAGCDGRLFKLISQLGRLNLLSQDQEPNLSRPNDAGVPTASLPPNMLFPGWDTVVPNTGTGSVPEYGFSLPTPPQSSDSSHRPTSPEFWTEWYSLRQRLESWRFDPPAHASFPSPPLSASAMAWNATTYLTPRTSSSAYQVAPENLQDVYQISECFRHAALLYCERLAEPTLPSSHGRIQHLVQLAMHCIITVQSDVYLLWPLFIVGSECVQDNHRSIIRNRCKDISKDSGFINNLSCLELLERIWAEHSDESSFPVYPSGLGPPPPLAGGRAPSQAFRWSRVMQAKRGDGEYMVA

SEQ ID NO: 203 - protein, 805 aa, Penicillium chrysogenum
MASDNADRPSRDPAPKGKSRKTDPNAPIRKRRKRTVVSGAPDDCFACSKRGARCDRRRPYCSQCLDLGRECSGYKTTLTWGVGVASRGKLRGQKLPVMQSEEQLSGNAVKSQPEASSSSGPSSRVPGDSSAPMPPSTGPEMASFGTRTPSVKQEGSPPIMPAAFDMCSDMAWTMDMPDPQTWSSTLAAPPAISGLPLPSRPMIPNNTSQDMTPEPPLLYAPIQSPTANSGSLVWPTAVPSSSQAATPPASQDTDEEEVKYDPNYNMLWNAAHSPSLSQLLLARSVGRTPRLRYLISYYAEVITPMIVAFDTPTNPFRTQVIRLAMESEALQEAIATLATSNLRQRREHNHLSTERTLPARMSSMAHRALTDEDFQDRYGISMVEGYMREENHHRGMAVKALNADLADPRRRLSDSVLATLLMLCLFHGCDTGVAGFRAQFAGVTRLLAIRMRHSRVIPDSLKWFIRMFSWFDTLTATTNDRDVQLRGTCLEISSKTDGEWGLENLAGCDGRLFKLISQLGRLNLLSQEQEPSLSRPKDASVSTASLPPNMLFPGWETVVPNPGMGSVPEYGFSLPTPPQSSDSSRRPSSPEFWTEWYSLRQRLESWRFDPPAQASQAAFPSPPLSASTMTWNATTYVTPQTSSSAYQVAPGNLQDVYQISECFRHAALLYCERLAEPTLPSSHGRIQHLVQLAMHCIITVQSDVYLLWPLFIVGSECVQDDHRSIIRDRCKDISKDSGFINNISCLQLLEQIWAEHSDESSFPIYPSGFGPPPPLAGGRAPASSQAFRWSRVMQAKRGDGEYMVA

SEQ ID NO: 204 - protein, 612 aa, Aspergillus niger
MDGTYTMAPTSVQGQPSFAYYADSQQRQHFTSHPSDMQSYYGQVQAFQQQPQHCMPEQQTLYTAPLMNMHQMATTNAFRGAMNMTPIASPQPSHLKPTIVVQQGSPALMPLDTRFVGNDYYAFPSTPPLSTAGSSISSPPSTSGTLHTPINDSFFAFEKVEGVKEGCEGDVHAEILANADWARSDSPPLTPVFIHPPSLTASQTSELLSAHSSCPSLSPSPSPVVPTFVAQPQGLPTEQSSSDFCDPRQLTVESSINATPAELPPLPTLSCDDEEPRVVLGSEAVTLPVHETLSPAFTCSSSEDPLSSLPTFDSFSDLDSEDEFVNRLVDFPPSGNAYYLGEKRQRVGTTYPLEEEEFFSEQSFDESDEQDLSQSSLPYLGSHDFTGVQTNINEASEEMGNKKRNNRKSLKRASTSDSETDSISKKSQPSINSRATSTETNASTPQTVQARHNSDAHSSCASEAPAAPVSVNRRGRKQSLTDDPSKTFVCTLCSRRFRRQEHLKRHYRSLHTQDKPFECNECGKKFSRSDNLAQHARTHAGGSVVMGVIDTGNATPPTPYEERDPSTLGNVLYEAANAAATKSTTSESDESSSDSPVADRRAPKKRKRDSDA

SEQ ID NO: 205 - DNA, 21 bp, Artificial Sequence
  Primer
gccauuucggcuagcaucatt

SEQ ID NO: 206 - DNA, 21 bp, Artificial Sequence
  Primer
guauucaucgguauccuuutt

SEQ ID NO: 207 - DNA, 21 bp, Artificial Sequence
  Primer
ggauaagucacuuucugaatt

SEQ ID NO: 208 - DNA, 21 bp, Artificial Sequence
  Primer
gucugacucggacauuaagtt

SEQ ID NO: 209 - DNA, 21 bp, Artificial Sequence
  Primer
gcaugguggacuucuucuatt

SEQ ID NO: 210 - DNA, 21 bp, Artificial Sequence
  Primer
cucucucacagaucaaguutt

SEQ ID NO: 211 - DNA, 21 bp, Artificial Sequence
  Primer
cucauguuggcugacggaatt

SEQ ID NO: 212 - DNA, 21 bp, Artificial Sequence
  Primer
gcaaucucgccggcucaautt

SEQ ID NO: 213 - DNA, 21 bp, Artificial Sequence
  Primer
gcaagaugcuuccgucacutt

SEQ ID NO: 214 - DNA, 21 bp, Artificial Sequence
  Primer
ggcaagaaguucucucgcatt

SEQ ID NO: 215 - DNA, 21 bp, Artificial Sequence
  Primer
cuguguaucuccagucccatt

SEQ ID NO: 216 - DNA, 21 bp, Artificial Sequence
  Primer
cccuuugagugcaacgagutt

SEQ ID NO: 217 - DNA, 21 bp, Artificial Sequence
  Primer
ggugcacguugcugccaautt

SEQ ID NO: 218 - DNA, 21 bp, Artificial Sequence
  Primer
cacguugcugccaauucautt

SEQ ID NO: 219 - DNA, 21 bp, Artificial Sequence
  Primer
gguuggacguggucauguutt

SEQ ID NO: 220 - DNA, 21 bp, Artificial Sequence
  Primer
ctcaatcgcacgctattagtc

SEQ ID NO: 221 - DNA, 20 bp, Artificial Sequence
  Primer
aactcgcagtccttcatctc

SEQ ID NO: 222 - DNA, 20 bp, Artificial Sequence
  Primer
tttgatgaacgccaatacct

SEQ ID NO: 223 - DNA, 20 bp, Artificial Sequence
  Primer
gatgtatgacctggctaacc

SEQ ID NO: 224 - DNA, 20 bp, Artificial Sequence
  Primer
atgttgggtcgtttgttcac

SEQ ID NO: 225 - DNA, 20 bp, Artificial Sequence
  Primer
tgatccgtatgtcttgttcc

SEQ ID NO: 226 - DNA, 20 bp, Artificial Sequence
  Primer
accttctccagcagtttacc

SEQ ID NO: 227 - DNA, 20 bp, Artificial Sequence
  Primer
cagggtgggaatataacgtc

SEQ ID NO: 228 - DNA, 20 bp, Artificial Sequence
  Primer
ctgtgtatctccagtcccag

SEQ ID NO: 229 - DNA, 20 bp, Artificial Sequence
  Primer
cagaagtcaacatcgtgctc

SEQ ID NO: 230 - DNA, 20 bp, Artificial Sequence
  Primer
gaatgcccaatacttctctg

SEQ ID NO: 231 - DNA, 18 bp, Artificial Sequence
  Primer
gctacctgatccgtagtg

SEQ ID NO: 232 - DNA, 20 bp, Artificial Sequence
  Primer
tctgtccaaccaaagagtcc

SEQ ID NO: 233 - DNA, 21 bp, Artificial Sequence
  Primer
aaaggtatcggagtcatcagg

SEQ ID NO: 234 - DNA, 20 bp, Artificial Sequence
  Primer
tgaaggagcttgaagaacac

SEQ ID NO: 235 - DNA, 24 bp, Artificial Sequence
  Primer
ctttaggatggagaactgattgtc

SEQ ID NO: 236 - DNA, 20 bp, Artificial Sequence
  Primer
cagtacaaccattccaccac

SEQ ID NO: 237 - DNA, 20 bp, Artificial Sequence
  Primer
ttgctgattgatacgcagag

SEQ ID NO: 238 - DNA, 21 bp, Artificial Sequence
  Primer
gtaacgagaaccaagacactg

SEQ ID NO: 239 - DNA, 21 bp, Artificial Sequence
  Primer
caggagcatagatgtcaacac

SEQ ID NO: 240 - DNA, 21 bp, Artificial Sequence
  Primer
tagacggattcctgtataccc

SEQ ID NO: 241 - DNA, 23 bp, Artificial Sequence
  Primer
gggacattccacatatagttcca

SEQ ID NO: 242 - DNA, 20 bp, Artificial Sequence
  Primer
gaactcagtcctcatccacc

SEQ ID NO: 243 - DNA, 20 bp, Artificial Sequence
  Primer
atgttgccgttgaagaagac

SEQ ID NO: 244 - DNA, 21 bp, Artificial Sequence
  Primer
aagactggaggagtgatttgg

SEQ ID NO: 245 - DNA, 21 bp, Artificial Sequence
  Primer
gtctccctcaaagtagtagcc

SEQ ID NO: 246 - DNA, 18 bp, Artificial Sequence
  Primer
tccattcgtgtccctacc

SEQ ID NO: 247 - DNA, 19 bp, Artificial Sequence
  Primer
agataccagcctcaatgtc

SEQ ID NO: 248 - DNA, 57 bp, Artificial Sequence
  Primer
gtaacgccagggttttcccagtcacgacggtttaaacatggggattggagagtgatg

SEQ ID NO: 249 - DNA, 68 bp, Artificial Sequence
  Primer
gcgctggcaacgagagcagagcagcagtagtcgatgctaggcggccgcgaagcaaccgaggtgaaaag

SEQ ID NO: 250 - DNA, 68 bp, Artificial Sequence
  Primer
caaccagccgcagcctcagcctctctcagcctcatcagccgcggccgcacgatgcaggtttggttttc

SEQ ID NO: 251 - DNA, 57 bp, Artificial Sequence
  Primer
gcggataacaatttcacacaggaaacagcgtttaaaccaccggaattgtctgacctt

SEQ ID NO: 252 - DNA, 20 bp, Artificial Sequence
  Primer
caccaactggcaagtctcaa

SEQ ID NO: 253 - DNA, 19 bp, Artificial Sequence
  Primer
ggagaatttcgtgcgatcc

SEQ ID NO: 254 - DNA, 20 bp, Artificial Sequence
  Primer
gcatggttgcctagtgaatg

SEQ ID NO: 255 - DNA, 20 bp, Artificial Sequence
  Primer
tgatctcgcgaagaaccttt

SEQ ID NO: 256 - DNA, 20 bp, Artificial Sequence
  Primer
gcctcggggagatatgagat

SEQ ID NO: 257 - DNA, 20 bp, Artificial Sequence
  Primer
aaaattccaaggcgacacac

SEQ ID NO: 258 - DNA, 57 bp, Artificial Sequence
  Primer
gtaacgccagggttttcccagtcacgacggtttaaaccggagctgggtagaagtgtc

SEQ ID NO: 259 - DNA, 69 bp, Artificial Sequence
  Primer
gcgctggcaacgagagcagagcagcagtagtcgatgctaggcggccgctgatggaagagagggttgaga

SEQ ID NO: 260 - DNA, 68 bp, Artificial Sequence
  Primer
caaccagccgcagcctcagcctctctcagcctcatcagccgcggccgccaatcccgagactcaactcc

SEQ ID NO: 261 - DNA, 58 bp, Artificial Sequence
  Primer
gcggataacaatttcacacaggaaacagcgtttaaactcagaacatgatccactcgac

SEQ ID NO: 262 - DNA, 20 bp, Artificial Sequence
  Primer
agttccctgatgtggacctg

SEQ ID NO: 263 - DNA, 19 bp, Artificial Sequence
  Primer
ggagaatttcgtgcgatcc

SEQ ID NO: 264 - DNA, 20 bp, Artificial Sequence
  Primer
gcatggttgcctagtgaatg

SEQ ID NO: 265 - DNA, 20 bp, Artificial Sequence
  Primer
tttcattgccgctcatcata

SEQ ID NO: 266 - DNA, 20 bp, Artificial Sequence
  Primer
cttatggcggagaagctgac

SEQ ID NO: 267 - DNA, 20 bp, Artificial Sequence
  Primer
ggtttgctagccgttcagag

SEQ ID NO: 268 - DNA, 57 bp, Artificial Sequence
  Primer
gtaacgccagggttttcccagtcacgacggtttaaactaattgacccggacaaggag

SEQ ID NO: 269 - DNA, 68 bp, Artificial Sequence
  Primer
gcgctggcaacgagagcagagcagcagtagtcgatgctaggcggccgcgaagaacatggggaagcaaa

SEQ ID NO: 270 - DNA, 68 bp, Artificial Sequence
  Primer
caaccagccgcagcctcagcctctctcagcctcatcagccgcggccgcccatttcctttggtttgtgg

SEQ ID NO: 271 - DNA, 57 bp, Artificial Sequence
  Primer
gcggataacaatttcacacaggaaacagcgtttaaacacatggtcaatccccacagt

SEQ ID NO: 272 - DNA, 20 bp, Artificial Sequence
  Primer
ctcacattgcctcgaacaga

SEQ ID NO: 273 - DNA, 20 bp, Artificial Sequence
  Primer
tcttgagcacgacaatcgac

SEQ ID NO: 274 - DNA, 20 bp, Artificial Sequence
  Primer
gcatggttgcctagtgaatg

SEQ ID NO: 275 - DNA, 20 bp, Artificial Sequence
  Primer
atcgttgcacatcaggtgag

SEQ ID NO: 276 - DNA, 20 bp, Artificial Sequence
  Primer
agtcctacagggtggcattg

SEQ ID NO: 277 - DNA, 20 bp, Artificial Sequence
  Primer
tcgacatcgagcatcaactc

SEQ ID NO: 278 - DNA, 57 bp, Artificial Sequence
  Primer
gtaacgccagggttttcccagtcacgacggtttaaacctcgaaagcagccaacaaat

SEQ ID NO: 279 - DNA, 68 bp, Artificial Sequence
  Primer
gcgctggcaacgagagcagagcagcagtagtcgatgctaggcggccgccgctgggcttgattaacatt

SEQ ID NO: 280 - DNA, 68 bp, Artificial Sequence
  Primer
caaccagccgcagcctcagcctctctcagcctcatcagccgcggccgctgctgccaattcatttacca

SEQ ID NO: 281 - DNA, 59 bp, Artificial Sequence
  Primer
gcggataacaatttcacacaggaaacagcgtttaaacttccagatcctcctttatagcc

SEQ ID NO: 282 - DNA, 20 bp, Artificial Sequence
  Primer
caccgcacgcttcatactta

SEQ ID NO: 283 - DNA, 20 bp, Artificial Sequence
  Primer
tcttgagcacgacaatcgac

SEQ ID NO: 284 - DNA, 20 bp, Artificial Sequence
  Primer
gcatggttgcctagtgaatg

SEQ ID NO: 285 - DNA, 20 bp, Artificial Sequence
  Primer
agctagaggagcgagggaag

SEQ ID NO: 286 - DNA, 20 bp, Artificial Sequence
  Primer
agcaagtcacctggttggac

SEQ ID NO: 287 - DNA, 20 bp, Artificial Sequence
  Primer
gaacgcggtaggtgattgat

SEQ ID NO: 288 - DNA, 57 bp, Artificial Sequence
  Primer
gtaacgccagggttttcccagtcacgacggtttaaacgagcattcgctagtgggaag

SEQ ID NO: 289 - DNA, 68 bp, Artificial Sequence
  Primer
gcgctggcaacgagagcagagcagcagtagtcgatgctaggcggccgctggtaagggtgatggaggag

SEQ ID NO: 290 - DNA, 68 bp, Artificial Sequence
  Primer
caaccagccgcagcctcagcctctctcagcctcatcagccgcggccgcctctcatacgcctgacacga

SEQ ID NO: 291 - DNA, 57 bp, Artificial Sequence
  Primer
gcggataacaatttcacacaggaaacagcgtttaaaccgttctttccacccaaggta

SEQ ID NO: 292 - DNA, 20 bp, Artificial Sequence
  Primer
tctggctctgacgttgattg

SEQ ID NO: 293 - DNA, 20 bp, Artificial Sequence
  Primer
tcttgagcacgacaatcgac

SEQ ID NO: 294 - DNA, 20 bp, Artificial Sequence
  Primer
gcatggttgcctagtgaatg

SEQ ID NO: 295 - DNA, 20 bp, Artificial Sequence
  Primer
tcaagcctgtcaaaccgaat

SEQ ID NO: 296 - DNA, 20 bp, Artificial Sequence
  Primer
gacagaagaaggaccgcaag

SEQ ID NO: 297 - DNA, 20 bp, Artificial Sequence
  Primer
atctctgaggcgatctggaa

SEQ ID NO: 298 - DNA, 57 bp, Artificial Sequence
  Primer
gtaacgccagggttttcccagtcacgacggtttaaacgggcaaggagtttcttaggg

SEQ ID NO: 299 - DNA, 68 bp, Artificial Sequence
  Primer
gcgctggcaacgagagcagagcagcagtagtcgatgctaggcggccgcacatcgcatctgaccttcct

SEQ ID NO: 300 - DNA, 68 bp, Artificial Sequence
  Primer
caaccagccgcagcctcagcctctctcagcctcatcagccgcggccgctatcatggcagctgatgctc

SEQ ID NO: 301 - DNA, 57 bp, Artificial Sequence
  Primer
gcggataacaatttcacacaggaaacagcgtttaaacgcggttttcgtctgtctagg

SEQ ID NO: 302 - DNA, 20 bp, Artificial Sequence
  Primer
acagccacgagacctttgag

SEQ ID NO: 303 - DNA, 20 bp, Artificial Sequence
  Primer
tcttgagcacgacaatcgac

SEQ ID NO: 304 - DNA, 20 bp, Artificial Sequence
  Primer
gcatggttgcctagtgaatg

SEQ ID NO: 305 - DNA, 20 bp, Artificial Sequence
  Primer
catatcgcccacttcgtaca

SEQ ID NO: 306 - DNA, 20 bp, Artificial Sequence
  Primer
agacgtacatgcagcactcg

SEQ ID NO: 307 - DNA, 20 bp, Artificial Sequence
  Primer
cagtccctctcccggatact

SEQ ID NO: 308 - DNA, 57 bp, Artificial Sequence
  Primer
gtaacgccagggttttcccagtcacgacggtttaaacaagaaggcgcaaagacgtta

SEQ ID NO: 309 - DNA, 68 bp, Artificial Sequence
  Primer
gcgctggcaacgagagcagagcagcagtagtcgatgctaggcggccgctagaagaaaatcgggcatcg

SEQ ID NO: 310 - DNA, 68 bp, Artificial Sequence
  Primer
caaccagccgcagcctcagcctctctcagcctcatcagccgcggccgcggacgccttctgtccataaa

SEQ ID NO: 311 - DNA, 57 bp, Artificial Sequence
  Primer
gcggataacaatttcacacaggaaacagcgtttaaacaatttcccgctggtttctct

SEQ ID NO: 312 - DNA, 20 bp, Artificial Sequence
  Primer
gtttcttggagacccgtcat

SEQ ID NO: 313 - DNA, 20 bp, Artificial Sequence
  Primer
tcttgagcacgacaatcgac

SEQ ID NO: 314 - DNA, 20 bp, Artificial Sequence
  Primer
gcatggttgcctagtgaatg

SEQ ID NO: 315 - DNA, 20 bp, Artificial Sequence
  Primer
tgtccaaggtcgatgtcaag

SEQ ID NO: 316 - DNA, 20 bp, Artificial Sequence
  Primer
tgcgactttcgacatgagtc

SEQ ID NO: 317 - DNA, 20 bp, Artificial Sequence
  Primer
gaaactcagacgcgttaggc

SEQ ID NO: 318 - DNA, 57 bp, Artificial Sequence
  Primer
gtaacgccagggttttcccagtcacgacggtttaaacagctggagacgcaatacctg

SEQ ID NO: 319 - DNA, 68 bp, Artificial Sequence
  Primer
gcgctggcaacgagagcagagcagcagtagtcgatgctaggcggccgcagcattcgctccgtgtaagt

SEQ ID NO: 320 - DNA, 68 bp, Artificial Sequence
  Primer
caaccagccgcagcctcagcctctctcagcctcatcagccgcggccgcttctgtttcctcacggctct

SEQ ID NO: 321 - DNA, 57 bp, Artificial Sequence
  Primer
gcggataacaatttcacacaggaaacagcgtttaaactacaccccacacgagaacaa

SEQ ID NO: 322 - DNA, 20 bp, Artificial Sequence
  Primer
caaggagcccagcgtaatag

SEQ ID NO: 323 - DNA, 20 bp, Artificial Sequence
  Primer
tcttgagcacgacaatcgac

SEQ ID NO: 324 - DNA, 20 bp, Artificial Sequence
  Primer
gcatggttgcctagtgaatg

SEQ ID NO: 325 - DNA, 20 bp, Artificial Sequence
  Primer
caccacgctcattctctttg

SEQ ID NO: 326 - DNA, 20 bp, Artificial Sequence
  Primer
cattcgcctcaagcttcact

SEQ ID NO: 327 - DNA, 19 bp, Artificial Sequence
  Primer
gagatcggccagatcctgt

SEQ ID NO: 328 - DNA, 21 bp, Artificial Sequence
  Primer
cucauguuggcugacggaatt

SEQ ID NO: 329 - DNA, 21 bp, Artificial Sequence
  Primer
gcaaucucgccggcucaautt

SEQ ID NO: 330 - DNA, 21 bp, Artificial Sequence
  Primer
gcaagaugcuuccgucacutt

SEQ ID NO: 331 - DNA, 21 bp, Artificial Sequence
  Primer
ggugcacguugcugccaautt

SEQ ID NO: 332 - DNA, 21 bp, Artificial Sequence
  Primer
cacguugcugccaauucautt

SEQ ID NO: 333 - DNA, 21 bp, Artificial Sequence
  Primer
gguuggacguggucauguutt

SEQ ID NO: 334 - DNA, 21 bp, Artificial Sequence
  Primer
ggcaagaaguucucucgcatt

SEQ ID NO: 335 - DNA, 21 bp, Artificial Sequence
  Primer
cuguguaucuccagucccatt

SEQ ID NO: 336 - DNA, 21 bp, Artificial Sequence
  Primer
cccuuugagugcaacgagutt

SEQ ID NO: 337 - DNA, 21 bp, Artificial Sequence
  Primer
gucaagaugacgaugaaautt

SEQ ID NO: 338 - DNA, 21 bp, Artificial Sequence
  Primer
cugacaucaaucggcguaatt

SEQ ID NO: 339 - DNA, 21 bp, Artificial Sequence
  Primer
gagcaauugcggcacaggatt

SEQ ID NO: 340 - DNA, 21 bp, Artificial Sequence
  Primer
caaagaaacgcuccagaaatt

SEQ ID NO: 341 - DNA, 21 bp, Artificial Sequence
  Primer
gaaacucacacacauguuutt

SEQ ID NO: 342 - DNA, 21 bp, Artificial Sequence
  Primer
cucaugaaggccauccagatt

SEQ ID NO: 343 - DNA, 21 bp, Artificial Sequence
  Primer
cagaugguccucacacaautt

SEQ ID NO: 344 - DNA, 21 bp, Artificial Sequence
  Primer
gucugguggugcugcuucatt

SEQ ID NO: 345 - DNA, 21 bp, Artificial Sequence
  Primer
ggcaagacgugguucuggatt

SEQ ID NO: 346 - DNA, 21 bp, Artificial Sequence
  Primer
guucagucugcguacgauutt

SEQ ID NO: 347 - DNA, 21 bp, Artificial Sequence
  Primer
ccguauucccaucaucauatt

SEQ ID NO: 348 - DNA, 21 bp, Artificial Sequence
  Primer
cuucaacuugcuuaugaaatt

SEQ ID NO: 349 - DNA, 21 bp, Artificial Sequence
  Primer
gaaggaaccgcgauucauutt

SEQ ID NO: 350 - DNA, 21 bp, Artificial Sequence
  Primer
gauucauuacuucgaucuutt

SEQ ID NO: 351 - DNA, 21 bp, Artificial Sequence
  Primer
gugcauugugcuucaucuatt

SEQ ID NO: 352 - DNA, 21 bp, Artificial Sequence
  Primer
gcgucaaggcccucggccatt

SEQ ID NO: 353 - DNA, 21 bp, Artificial Sequence
  Primer
gccaucucgcgacccagaatt

SEQ ID NO: 354 - DNA, 21 bp, Artificial Sequence
  Primer
ccuucaugauuacugccaatt

SEQ ID NO: 355 - DNA, 68 bp, Artificial Sequence
  Primer
gagagaagggcacgtacttacaaacacatctcttgcatagggcgcgccctggagtgtcttgatcatca

SEQ ID NO: 356 - DNA, 68 bp, Artificial Sequence
  Primer
gtcaagctgtttgatgatttcagtaacgttaagtggatccgcgatcgcggtgacctgtttactcagtt

SEQ ID NO: 357 - DNA, 68 bp, Artificial Sequence
  Primer
gagagaagggcacgtacttacaaacacatctcttgcatagggcgcgccttcagggtggttgcgaagag

SEQ ID NO: 358 - DNA, 68 bp, Artificial Sequence
  Primer
gtcaagctgtttgatgatttcagtaacgttaagtggatccgcgatcgcccgttaccttggccgcgaag

SEQ ID NO: 359 - DNA, 68 bp, Artificial Sequence
  Primer
cctcgatatgaaagtcttcaccgctgacttgctgctctagggcgcgcccgtctacgttgaccacgggg

SEQ ID NO: 360 - DNA, 68 bp, Artificial Sequence
  Primer
gtcaagctgtttgatgatttcagtaacgttaagtggatccgcgatcgctttagcggtggctcaactgc

1-21. (canceled)

22. A Trichoderma cell having reduced or no activity in one or more regulatory proteins selected from the group consisting of ptf1 (SEQ ID NO:1), prp1 (SEQ ID NO:2), ptf9 (SEQ ID NO:3), ptf3 (SEQ ID NO:4), ptf8 (SEQ ID NO:5), ptf5 (SEQ ID NO:6), ptf6 (SEQ ID NO:7), ptf2 (SEQ ID NO:8), ptf4 (SEQ ID NO:9), ptf10 (SEQ ID NO:10), ptf7 (SEQ ID NO: 11) and prp2 (SEQ ID NO:12).

23. The Trichoderma cell of claim 22, which is Trichoderma reesei.

24. The Trichoderma cell of claim 22, comprising a mutation in at least one gene encoding said regulatory protein selected from prp1, prp2, ptf1, ptf2, ptf3, ptf4, ptf5, ptf6, ptf7, ptf8, ptf9 and ptf10, said mutation rendering said regulatory protein non-functional.

25. The Trichoderma cell of claim 22, which is selected from the group consisting of Δprp1, Δptf1, Δprp1 Δptf1, Δptf2, Δptf3, Δptf4, Δptf4 Δprp1 Δptf1, App, Δptf7 Δprp1 Δptf1, Δptf9, Δptf9 Δprp1 Δptf1, Δptf8 and Δptf8 Δprp1 Δptf1 deletion mutant Trichoderma cells.

26. The Trichoderma cell of claim 22, comprising a mutation in at least one gene encoding a protease, said mutation reducing or eliminating the corresponding protease activity, and said protease being selected from the group consisting of pep 1, tsp1, slp1, gap1, gap2, pep4, pep3, and pep5.

27. The Trichoderma cell of claim 22, comprising a mutation in at least one gene encoding a protease, said mutation reducing or eliminating the corresponding protease activity, and said protease being selected from the group consisting of the following protease pep4, pep8, pep9, pep 11, slp5, cpa5, cpa2, cpa3, amp3, tpp1, pep12, amp2, mp1, mp2, mp3, mp4, mp5, amp1, sep1, slp2, slp3, slp6, slp7, and slp8.

28. The Trichoderma cell of claim 22, comprising a mutation in a gene encoding ALG3, wherein said mutation reduces or eliminates the corresponding activity.

29. The Trichoderma cell of claim 22, further comprising a first polynucleotide encoding the N-acetylglucosaminyltransferase I catalytic domain.

30. The Trichoderma cell of claim 22, further comprising a polynucleotide encoding an α-1,2-mannosidase, a mannosidase II, a galactosyl transferase and/or GDP-fucose synthesis activity.

31. The Trichoderma cell of claim 22, further comprising a recombinant nucleic acid encoding a heterologous mammalian polypeptide.

32. The Trichoderma cell of claim 31, wherein the mammalian polypeptide is glycosylated.

33. The Trichoderma cell of claim 31, wherein the mammalian polypeptide is selected from the group consisting of an antibody and their antigen-binding fragments, a growth factor, an interferon, a cytokine, and an interleukin.

34. A method of improving heterologous polypeptide production in a Trichoderma cell expression system, comprising
a) providing a Trichoderma cell according to claim 22 in which one or more regulatory proteins have reduced or eliminated activity, and
b) culturing said Trichoderma cell for production of a heterologous polypeptide, wherein the heterologous polypeptide is produced at a higher yield when compared to the heterologous polypeptide produced in a corresponding parental Trichoderma cell in which said one or more regulatory proteins do not have reduced or eliminated activity.

35. A method of making a heterologous polypeptide, comprising
a) providing a Trichoderma cell according to claim 22;
b) culturing said Trichoderma cell for production and secretion of a heterologous polypeptide in the culture medium; and,
c) recovering the heterologous polypeptide from the culture medium.

36. The method of claim 35, wherein the expression is reduced by contacting the cell with siRNA compounds directed against one or more of the genes encoding said regulatory proteins, wherein siRNA compound is directed against a gene encoding a regulatory protein selected from the group consisting of ptf1 (SEQ ID NO:1), prp1 (SEQ ID NO:2), ptf9 (SEQ ID NO:3), ptf3 (SEQ ID NO:4), ptf8 (SEQ ID NO:5), ptf5 (SEQ ID NO:6), ptf6 (SEQ ID NO:7), ptf2 (SEQ ID NO:8), ptf4 (SEQ ID NO:9), ptf10 (SEQ ID NO:10), ptf7 (SEQ ID NO:11) and prp2 (SEQ ID NO:12).

37. The method of claim 36, wherein the siRNA compound is further directed to a gene encoding a protease.

38. The method of claim 37, wherein said protease is selected from the group consisting of pep4, pep8, pep9, pep 11, slp5, cpa5, cpa2, cpa3, amp3, tpp1, pep12, amp2, mp1, mp2, mp3, mp4, mp5, amp1, sep1, slp2, slp3, slp6, slp7, slp8.

39. The Trichoderma cell of claim 26, comprising a deletion mutation in at least one gene encoding said regulatory protein selected from prp1, prp2, ptf1, ptf2, ptf3, ptf4, ptf5, ptf6, ptf7, ptf8, ptf9 and ptf10, said deletion mutation rendering said regulatory protein non-functional.

40. The Trichoderma cell of claim 26, comprising a deletion mutation in at least one gene encoding a protease, said mutation eliminating the corresponding protease activity.

41. The Trichoderma cell of claim 29, further comprising a second polynucleotide encoding the N-acetylglucosaminyltransferase II catalytic domain.
